(19) United States
(12) Patent Application Publication
(10) Pub. No.: US 2025/0333742 A1
(43) Pub. Date: Oct. 30, 2025

(54) COMPOSITIONS AND METHODS FOR TREATING METABOLIC DYSFUNCTION-ASSOCIATED STEATOTIC LIVER DISEASE

(71) Applicant: Insitro, Inc., South San Francisco, CA (US)

(72) Inventors: David John LLOYD, Lafayette, CA (US); Santhosh SATAPATI, Dublin, CA (US); Arijit BHOWMICK, Astoria, NY (US); Sumit MUKHERJEE, Issaquah, WA (US); Hari SOMINENI, Quincy, MA (US); Tima Sheren Dehghani HARDMAN, Brisbane, CA (US)

(73) Assignee: Insitro, Inc., South San Francisco, CA (US)

(21) Appl. No.: 19/189,062

(22) Filed: Apr. 24, 2025

Related U.S. Application Data
(60) Provisional application No. 63/638,729, filed on Apr. 25, 2024.

(51) Int. Cl. C12N 15/113; A61K 9/00; A61K 31/713; A61K 47/51; A61K 48/00; A61P 3/10

(52) U.S. Cl. CPC C12N 15/1137; A61K 9/0019; A61K 31/713; A61K 47/51; A61K 48/0008; A61K 48/005; A61K 48/0075; A61P 3/10; C12N 2310/11; C12N 2310/33

(57) ABSTRACT

Described are compositions and methods for inhibition of glucokinase (GCK) gene expression and protein production. RNA interference (RNAi) agents for inhibiting the expression of GCK gene are described. The GCK RNAi agents disclosed herein may be targeted to cells, such as hepatocytes, for example, by using conjugated targeting ligands. Pharmaceutical compositions comprising one or more GCK RNAi agents optionally with one or more additional therapeutics are also described.

### CROSS-REFERENCE TO RELATED APPLICATIONS

[0001] This application claims priority to and the benefit of U.S. Provisional Application No. 63/638,729, filed on Apr. 25, 2024, the contents of which is incorporated herein in its entirety.

### REFERENCE TO AN ELECTRONIC SEQUENCE LISTING

[0002] The contents of the electronic sequence listing (208782003500SEQLIST.xml; Size: 3, 972, 210 bytes; and Date of Creation: Apr. 21, 2025) is herein incorporated by reference in its entirety.

### FIELD

[0003] The present disclosure relates to RNA interference (RNAi) agents to inhibit the expression of glucokinase (GCK), an enzyme that facilitates the conversion of glucose to glucose-6-phosphate. The disclosure also relates to compositions that include GCK RNAi agents and methods of use thereof, including the use of such GCK RNAi agents in the treatment of metabolic dysfunction-associated steatotic liver disease (MASLD) and/or metabolic dysfunction-associated steatohepatitis (MASH).

### BACKGROUND

[0004] Metabolic dysfunction-associated steatotic liver disease (MASLD), previously referred to as non-alcoholic fatty liver disease (NAFLD), is caused by a build-up of fat in the liver, occasionally appearing as multiple nodular areas, and includes a range of disease states, from isolated lipid accumulation or steatosis (metabolic dysfunction-associated steatotic liver, MASL) through to its active inflammatory form, metabolic dysfunction-associated steatohepatitis (MASH), previously referred to as non-alcoholic steatohepatitis (NASH). Persistence of MASH leads, in some cases, to cirrhosis (scarring of the liver), liver failure and liver cancer. MASLD and MASH are both linked to being overweight or obese, insulin resistance, high blood sugar (hyperglycemia), and high levels of fats (particularly triglycerides) in the blood. MASLD is also a risk factor for type 2 diabetes. Lifestyle modification remains the cornerstone of management of MASLD and MASH including losing weight, keeping a healthy diet, limiting over the counter drugs, and avoiding alcohol. Additional treatment options include medications to reduce blood pressure or control diabetes. If MASLD or MASH leads to cirrhosis, treatment of the complications of cirrhosis with medicines, minor medical procedures, and surgery may be necessary. Individuals with liver failure or liver cancer may need a liver transplant to restore health.

[0005] MASLD is increasingly common around the world, especially in Western nations where it is the leading cause of liver disease. In the United States, it is the most common form of chronic liver disease, affecting about one-quarter of the population. It is a cause of end-stage liver disease, with increased mortality secondary to cirrhosis and its complications. There continues to be a need or safe and effective treatments for MASLD and MASH.

### SUMMARY

[0006] Provided herein are RNA interference (RNAi) agents to inhibit the expression of glucokinase (GCK).

[0007] Described herein is an RNAi agent that inhibits expression of glucokinase (GCK) for use in the treatment of metabolic dysfunction-associated steatotic liver disease (MASLD) or metabolic dysfunction-associated steatotic liver (MASL) in a subject, wherein the RNAi agent comprises (i) an antisense strand and a sense strand that at least partially complements the antisense strand, and (ii) a targeting ligand conjugated to the antisense strand or the sense strand, wherein the targeting ligand targets a hepatocyte.

[0008] Described herein is an RNAi agent that inhibits expression of glucokinase (GCK) comprising an antisense strand and a sense strand that at least partially complements the antisense strand, and a targeting ligand conjugated to the antisense strand or the sense strand, wherein the targeting ligand targets a hepatocyte.

[0009] Described herein is an RNAi agent that inhibits expression of glucokinase (GCK) comprising an antisense strand and a sense strand that at least partially complements the antisense strand, wherein: (a) the antisense strand comprises at least 14 contiguous bases from any one of SEQ ID NOS: 1-96; and/or (b) the sense strand comprises at least 14 contiguous bases from any one of SEQ ID NOS: 97-192.

[0010] In some implementations, one or more bases of the antisense stand and/or the sense strand are modified. In some implementations, the antisense strand has a modification pattern according to nsNfsnnnNfnnnnnnnNfnNfnnnnnsnsn. In some implementations, the sense strand has a modification pattern according to nsnsnnnnNfnNfNfNfnnnnnnnnsnsn. In some implementations, the sense strand has a modification pattern according to nsnsnnnnNfnNfNfNfnnnnnnnnnn.

[0011] In some implementations, (a) the antisense strand comprises at least 14 contiguous bases from any one of SEQ ID NOS: 193-288; and/or (b) the sense strand comprises at least 14 contiguous bases from any one of SEQ ID NOS: 289-384 and 385-480. In some implementations, the antisense strand comprises at least 14 contiguous bases that complement a sequence in an mRNA molecule that encodes GCK (SEQ ID NO: 481). In some implementations, the antisense strand and the sense strand form a duplex of at least 14 bases in length. In some implementations, the antisense strand and the sense strand form a duplex of between 15 and 30 bases in length. In some implementations, the antisense strand or a subsequence thereof differs by 0, 1, 2, 3, or 4 nucleotides from an equal length portion of any one of SEQ ID NOS: 1-96 and 193-288, wherein the subsequence is at least 14, 15, 16, 17, 18, 19, 20, 21, 22, or 23 bases in length.

[0012] In some implementations, the antisense strand comprises, in order, nucleotides 1-23 of any one of SEQ ID NOS: 1-96 and 193-288. In some implementations, the antisense strand comprises at least 14 contiguous bases from any one of SEQ ID NOS: 1-96 and 193-288. In some implementations, the antisense strand comprises, in order, nucleobases 1-14 of any one of SEQ ID NOS: 1-96 and 193-288. In some implementations, the antisense strand comprises at least 14 contiguous bases from any one of SEQ ID NOS: 8, 11, 14, 16, 35, 36, 38, 39, 41, 42, 52, 77, 84, 86, 87, 88, 89, 90, 93, 200, 203, 206, 208, 227, 228, 230, 231, 233, 234, 244, 269, 276, 278, 279, 280, 281, 282, and 285. In some implementations, the antisense strand comprises at least 14 contiguous bases from any one of SEQ ID NOS: 16, 35, 52, 84, 86, 89, 90, 208, 227, 244, 276, 278, 281, and 282.

[0013] In some implementations, the sense strand or a subsequence thereof differs by 0, 1, 2, 3, or 4 nucleotides from an equal length portion of any one of SEQ ID NOS: 97-192, 289-384, and 385-480, wherein the subsequence is at least 14, 15, 16, 17, 18, 19, 20, or 21 bases in length. In some implementations, the sense strand comprises, in order, nucleotides 1-21 of any one of SEQ ID NOS: 97-192, 289-384, and 385-480. In some implementations, the sense strand comprises at least 14 contiguous bases from any one of SEQ ID NOS: 97-192, 289-384, and 385-480. In some implementations, the sense strand comprises, in order, nucleobases 1-14 of any one of SEQ ID NOS: 97-192, 289-384, and 385-480. In some implementations, the sense strand comprises at least 14 contiguous bases from any one of SEQ ID NOS:104, 107, 110, 112, 131, 132, 134, 135, 137, 138, 148, 173, 180, 182, 183, 184, 185, 186, 189, 296, 299, 302, 304, 323, 324, 326, 327, 329, 330, 340, 365, 372, 374, 375, 376, 377, 378, 381, 392, 395, 398, 400, 419, 420, 422, 423, 425 426, 436, 461, 468, 470, 471, 472, 473, 474, and 477. In some implementations, the sense strand comprises at least 14 contiguous bases from any one of SEQ ID NOS: 112, 131, 148, 180, 182, 185, 186, 304, 323, 340, 372, 374, 377, 378, 400, 419, 436, 468, 470, 473, and 474.

[0014] In some implementations, the antisense strand comprises at least 16 contiguous bases that complement a sequence in an mRNA molecule that encodes GCK (SEQ ID NO: 481). In some implementations, the antisense strand and the sense strand form a duplex of at least 16 bases in length. In some implementations, the antisense strand comprises at least 16 contiguous bases from any one of SEQ ID NOS: 1-96 and 193-288. In some implementations, the antisense strand comprises at least 16 contiguous bases from any one of SEQ ID NOS: 8, 11, 14, 16, 35, 36, 38, 39, 41, 42, 52, 77, 84, 86, 87, 88, 89, 90, 93, 200, 203, 206, 208, 227, 228, 230, 231, 233, 234, 244, 269, 276, 278, 279, 280, 281, 282, and 285. In some implementations, the antisense strand comprises, in order, nucleobases 1-16, 1-17, 1-18, 1-19, 1-20, 1-21, 1-22, 1-23, 2-17, 2-18, 2-19, 2-20, 2-21, 2-22, 2-23, 3-18, 3-19, 3-20, 3-21, 3-22, 3-23, 4-19, 4-20, 4-21, 4-22, 4-23, 5-21, 5-22, 5-23, 6-20, 6-21, 6-22, 6-23, 7-22, 7-23, or 8-23 of any one of SEQ ID NOS: 1-96 and 193-288. In some implementations, the antisense strand comprises a nucleotide sequence according to any one of SEQ ID NOS: 1-96 and 193-288.

[0015] In some implementations, one or more nucleotides are modified. In some implementations, the antisense strand comprises a nucleotide sequence according to any one of SEQ ID NOS: 8, 11, 14, 16, 35, 36, 38, 39, 41, 42, 52, 77, 84, 86, 87, 88, 89, 90, and 93. In some implementations, the antisense strand comprises a nucleotide sequence according to any one of SEQ ID NOS: 16, 35, 52, 84, 86, 89, and 90. In some implementations, one or more nucleotides are modified. In some implementations, the antisense strand has a modification pattern according to nsNfsnnnNfnnnnnnnNfnNfnnnnnsnsn. In some implementations, the antisense strand comprises a modified nucleotide sequence according to any one of SEQ ID NOS: 193-288. In some implementations, the antisense strand comprises a modified nucleotide sequence according to any one of SEQ ID NOS: 200, 203, 206, 208, 227, 228, 230, 231, 233, 234, 244, 269, 276, 278, 279, 280, 281, 282, and 285. In some implementations, the antisense strand comprises a modified nucleotide sequence according to any one of SEQ ID NOS: 208, 227, 244, 276, 278, 281, and 282.

[0016] In some implementations, the sense strand comprises at least 16 contiguous bases from any one of SEQ ID NOS: 97-192, 289-384, and 385-480. In some implementations, the sense strand comprises at least 16 contiguous bases from any one of SEQ ID NOS: 104, 107, 110, 112, 131, 132, 134, 135, 137, 138, 148, 173, 180, 182, 183, 184, 185, 186, 189, 296, 299, 302, 304, 323, 324, 326, 327, 329, 330, 340, 365, 372, 374, 375, 376, 377, 378, 381, 392, 395, 398, 400, 419, 420, 422, 423, 425 426, 436, 461, 468, 470, 471, 472, 473, 474, and 477. In some implementations, the sense strand comprises at least 16 contiguous bases from any one of SEQ ID NOS: 112, 131, 148, 180, 182, 185, 186, 304, 323, 340, 372, 374, 377, 378, 400, 419, 436, 468, 470, 473, and 474. In some implementations, the sense strand comprises, in order, nucleobases 1-16, 1-17, 1-18, 1-19, 1-20, 1-21, 1-22, 1-23, 2-17, 2-18, 2-19, 2-20, 2-21, 2-22, 2-23, 3-18, 3-19, 3-20, 3-21, 3-22, 3-23, 4-19, 4-20, 4-21, 4-22, 4-23, 5-21, 5-22, 5-23, 6-20, 6-21, 6-22, 6-23, 7-22, 7-23, or 8-23 of any one of SEQ ID NOS: 97-192, 289-384, and 385-480.

[0017] In some implementations, the sense strand comprises a nucleobase sequence according to any one of SEQ ID NOS: 97-192, 289-384, and 385-480. In some implementations, one or more nucleotides are modified. In some implementations, the sense strand comprises a nucleobase sequence according to any one of SEQ ID NOS: 104, 107, 110, 112, 131, 132, 134, 135, 137, 138, 148, 173, 180, 182, 183, 184, 185, 186, and 189. In some implementations, the sense strand comprises a nucleobase sequence according to any one of SEQ ID NOS: 112, 131, 148, 180, 182, 185, and 186. In some implementations, one or more nucleotides are modified. In some implementations, the sense strand has a modification pattern according to nsnsnnnnNfnNfNfNfnnnnnnnnsnsn. In some implementations, the sense strand has a modification pattern according to nsnsnnnnNfnNfNfNfnnnnnnnnnn.

[0018] In some implementations, the sense strand comprises a modified nucleotide sequence according to any one of SEQ ID NOS: 289-384 and 385-480. In some implementations, the sense strand comprises a modified nucleotide sequence according to any one of SEQ ID NOS: 296, 299, 302, 304, 323, 324, 326, 327, 329, 330, 340, 365, 372, 374, 375, 376, 377, 378, 381, 392, 395, 398, 400, 419, 420, 422, 423, 425 426, 436, 461, 468, 470, 471, 472, 473, 474, and 477. In some implementations, the sense strand comprises a modified nucleotide sequence according to any one of SEQ ID NOS: 304, 323, 340, 372, 374, 377, 378, 400, 419, 436, 468, 470, 473, and 474.

[0019] In some implementations, (a) the sense strand comprises a nucleobase sequence according to SEQ ID NO: 97 and the antisense strand comprises a nucleobase sequence according to SEQ ID NO: 1;
[0020] (b) the sense strand comprises a nucleobase sequence according to SEQ ID NO: 98 and the antisense strand comprises a nucleobase sequence according to SEQ ID NO: 2;
[0021] (c) the sense strand comprises a nucleobase sequence according to SEQ ID NO: 99 and the antisense strand comprises a nucleobase sequence according to SEQ ID NO: 3;
[0022] (d) the sense strand comprises a nucleobase sequence according to SEQ ID NO: 100 and the antisense strand comprises a nucleobase sequence according to SEQ ID NO: 4;
[0023] (e) the sense strand comprises a nucleobase sequence according to SEQ ID NO: 101 and the antisense strand comprises a nucleobase sequence according to SEQ ID NO: 5;
[0024] (f) the sense strand comprises a nucleobase sequence according to SEQ ID NO: 102 and the antisense strand comprises a nucleobase sequence according to SEQ ID NO: 6;
[0025] (g) the sense strand comprises a nucleobase sequence according to SEQ ID NO: 103 and the antisense strand comprises a nucleobase sequence according to SEQ ID NO: 7;
[0026] (h) the sense strand comprises a nucleobase sequence according to SEQ ID NO: 104 and the antisense strand comprises a nucleobase sequence according to SEQ ID NO: 8;
[0027] (i) the sense strand comprises a nucleobase sequence according to SEQ ID NO: 105 and the antisense strand comprises a nucleobase sequence according to SEQ ID NO: 9;
[0028] (j) the sense strand comprises a nucleobase sequence according to SEQ ID NO: 106 and the antisense strand comprises a nucleobase sequence according to SEQ ID NO: 10;
[0029] (k) the sense strand comprises a nucleobase sequence according to SEQ ID NO: 107 and the antisense strand comprises a nucleobase sequence according to SEQ ID NO: 11;
[0030] (l) the sense strand comprises a nucleobase sequence according to SEQ ID NO: 108 and the antisense strand comprises a nucleobase sequence according to SEQ ID NO: 12;
[0031] (m) the sense strand comprises a nucleobase sequence according to SEQ ID NO: 109 and the antisense strand comprises a nucleobase sequence according to SEQ ID NO: 13;
[0032] (n) the sense strand comprises a nucleobase sequence according to SEQ ID NO: 110 and the antisense strand comprises a nucleobase sequence according to SEQ ID NO: 14;
[0033] (o) the sense strand comprises a nucleobase sequence according to SEQ ID NO: 111 and the antisense strand comprises a nucleobase sequence according to SEQ ID NO: 15;
[0034] (p) the sense strand comprises a nucleobase sequence according to SEQ ID NO: 112 and the antisense strand comprises a nucleobase sequence according to SEQ ID NO: 16;
[0035] (q) the sense strand comprises a nucleobase sequence according to SEQ ID NO: 113 and the antisense strand comprises a nucleobase sequence according to SEQ ID NO: 17;
[0036] (r) the sense strand comprises a nucleobase sequence according to SEQ ID NO: 114 and the antisense strand comprises a nucleobase sequence according to SEQ ID NO: 18;
[0037] (s) the sense strand comprises a nucleobase sequence according to SEQ ID NO: 115 and the antisense strand comprises a nucleobase sequence according to SEQ ID NO: 19;
[0038] (t) the sense strand comprises a nucleobase sequence according to SEQ ID NO: 116 and the antisense strand comprises a nucleobase sequence according to SEQ ID NO: 20;
[0039] (u) the sense strand comprises a nucleobase sequence according to SEQ ID NO: 117 and the antisense strand comprises a nucleobase sequence according to SEQ ID NO: 21;
[0040] (v) the sense strand comprises a nucleobase sequence according to SEQ ID NO: 118 and the antisense strand comprises a nucleobase sequence according to SEQ ID NO: 22;
[0041] (w) the sense strand comprises a nucleobase sequence according to SEQ ID NO: 119 and the antisense strand comprises a nucleobase sequence according to SEQ ID NO: 23;
[0042] (x) the sense strand comprises a nucleobase sequence according to SEQ ID NO: 120 and the antisense strand comprises a nucleobase sequence according to SEQ ID NO: 24;
[0043] (y) the sense strand comprises a nucleobase sequence according to SEQ ID NO: 121 and the antisense strand comprises a nucleobase sequence according to SEQ ID NO: 25;
[0044] (z) the sense strand comprises a nucleobase sequence according to SEQ ID NO: 122 and the antisense strand comprises a nucleobase sequence according to SEQ ID NO: 26;
[0045] (aa) the sense strand comprises a nucleobase sequence according to SEQ ID NO: 123 and the antisense strand comprises a nucleobase sequence according to SEQ ID NO: 27;
[0046] (bb) the sense strand comprises a nucleobase sequence according to SEQ ID NO: 124 and the antisense strand comprises a nucleobase sequence according to SEQ ID NO: 28;
[0047] (cc) the sense strand comprises a nucleobase sequence according to SEQ ID NO: 125 and the antisense strand comprises a nucleobase sequence according to SEQ ID NO: 29;
[0048] (dd) the sense strand comprises a nucleobase sequence according to SEQ ID NO: 126 and the antisense strand comprises a nucleobase sequence according to SEQ ID NO: 30;
[0049] (ee) the sense strand comprises a nucleobase sequence according to SEQ ID NO: 127 and the antisense strand comprises a nucleobase sequence according to SEQ ID NO: 31;
[0050] (ff) the sense strand comprises a nucleobase sequence according to SEQ ID NO: 128 and the antisense strand comprises a nucleobase sequence according to SEQ ID NO: 32;
[0051] (gg) the sense strand comprises a nucleobase sequence according to SEQ ID NO: 129 and the antisense strand comprises a nucleobase sequence according to SEQ ID NO: 33;
[0052] (hh) the sense strand comprises a nucleobase sequence according to SEQ ID NO: 130 and the antisense strand comprises a nucleobase sequence according to SEQ ID NO: 34;
[0053] (ii) the sense strand comprises a nucleobase sequence according to SEQ ID NO: 131 and the antisense strand comprises a nucleobase sequence according to SEQ ID NO: 35;
[0054] (jj) the sense strand comprises a nucleobase sequence according to SEQ ID NO: 132 and the antisense strand comprises a nucleobase sequence according to SEQ ID NO: 36;
[0055] (kk) the sense strand comprises a nucleobase sequence according to SEQ ID NO: 133 and the antisense strand comprises a nucleobase sequence according to SEQ ID NO: 37;
[0056] (ll) the sense strand comprises a nucleobase sequence according to SEQ ID NO: 134 and the antisense strand comprises a nucleobase sequence according to SEQ ID NO: 38;
[0057] (mm) the sense strand comprises a nucleobase sequence according to SEQ ID NO: 135 and the antisense strand comprises a nucleobase sequence according to SEQ ID NO: 39;
[0058] (nn) the sense strand comprises a nucleobase sequence according to SEQ ID NO: 136 and the antisense strand comprises a nucleobase sequence according to SEQ ID NO: 40;
[0059] (oo) the sense strand comprises a nucleobase sequence according to SEQ ID NO: 137 and the antisense strand comprises a nucleobase sequence according to SEQ ID NO: 41;
[0060] (pp) the sense strand comprises a nucleobase sequence according to SEQ ID NO: 138 and the antisense strand comprises a nucleobase sequence according to SEQ ID NO: 42;
[0061] (qq) the sense strand comprises a nucleobase sequence according to SEQ ID NO: 139 and the antisense strand comprises a nucleobase sequence according to SEQ ID NO: 43;
[0062] (rr) the sense strand comprises a nucleobase sequence according to SEQ ID NO: 140 and the antisense strand comprises a nucleobase sequence according to SEQ ID NO: 44;
[0063] (ss) the sense strand comprises a nucleobase sequence according to SEQ ID NO: 141 and the antisense strand comprises a nucleobase sequence according to SEQ ID NO: 45;
[0064] (tt) the sense strand comprises a nucleobase sequence according to SEQ ID NO: 142 and the antisense strand comprises a nucleobase sequence according to SEQ ID NO: 46;
[0065] (uu) the sense strand comprises a nucleobase sequence according to SEQ ID NO: 143 and the antisense strand comprises a nucleobase sequence according to SEQ ID NO: 47;
[0066] (vv) the sense strand comprises a nucleobase sequence according to SEQ ID NO: 144 and the antisense strand comprises a nucleobase sequence according to SEQ ID NO: 48;
[0067] (ww) the sense strand comprises a nucleobase sequence according to SEQ ID NO: 145 and the antisense strand comprises a nucleobase sequence according to SEQ ID NO: 49;
[0068] (xx) the sense strand comprises a nucleobase sequence according to SEQ ID NO: 146 and the antisense strand comprises a nucleobase sequence according to SEQ ID NO: 50;
[0069] (yy) the sense strand comprises a nucleobase sequence according to SEQ ID NO: 147 and the antisense strand comprises a nucleobase sequence according to SEQ ID NO: 51;
[0070] (zz) the sense strand comprises a nucleobase sequence according to SEQ ID NO: 148 and the antisense strand comprises a nucleobase sequence according to SEQ ID NO: 52;
[0071] (aaa) the sense strand comprises a nucleobase sequence according to SEQ ID NO: 149 and the antisense strand comprises a nucleobase sequence according to SEQ ID NO: 53;
[0072] (bbb) the sense strand comprises a nucleobase sequence according to SEQ ID NO: 150 and the antisense strand comprises a nucleobase sequence according to SEQ ID NO: 54;
[0073] (ccc) the sense strand comprises a nucleobase sequence according to SEQ ID NO: 151 and the antisense strand comprises a nucleobase sequence according to SEQ ID NO: 55;
[0074] (ddd) the sense strand comprises a nucleobase sequence according to SEQ ID NO: 152 and the antisense strand comprises a nucleobase sequence according to SEQ ID NO: 56;
[0075] (eee) the sense strand comprises a nucleobase sequence according to SEQ ID NO: 153 and the antisense strand comprises a nucleobase sequence according to SEQ ID NO: 57;
[0076] (fff) the sense strand comprises a nucleobase sequence according to SEQ ID NO: 154 and the antisense strand comprises a nucleobase sequence according to SEQ ID NO: 58;
[0077] (ggg) the sense strand comprises a nucleobase sequence according to SEQ ID NO: 155 and the antisense strand comprises a nucleobase sequence according to SEQ ID NO: 59;
[0078] (hhh) the sense strand comprises a nucleobase sequence according to SEQ ID NO: 156 and the antisense strand comprises a nucleobase sequence according to SEQ ID NO: 60;
[0079] (iii) the sense strand comprises a nucleobase sequence according to SEQ ID NO: 157 and the antisense strand comprises a nucleobase sequence according to SEQ ID NO: 61;
[0080] (jjj) the sense strand comprises a nucleobase sequence according to SEQ ID NO: 158 and the antisense strand comprises a nucleobase sequence according to SEQ ID NO: 62;
[0081] (kkk) the sense strand comprises a nucleobase sequence according to SEQ ID NO: 159 and the antisense strand comprises a nucleobase sequence according to SEQ ID NO: 63;
[0082] (lll) the sense strand comprises a nucleobase sequence according to SEQ ID NO: 160 and the antisense strand comprises a nucleobase sequence according to SEQ ID NO: 64;
[0083] (mmm) the sense strand comprises a nucleobase sequence according to SEQ ID NO: 161 and the antisense strand comprises a nucleobase sequence according to SEQ ID NO: 65;
[0084] (nnn) the sense strand comprises a nucleobase sequence according to SEQ ID NO: 162 and the antisense strand comprises a nucleobase sequence according to SEQ ID NO: 66;
[0085] (ooo) the sense strand comprises a nucleobase sequence according to SEQ ID NO: 163 and the antisense strand comprises a nucleobase sequence according to SEQ ID NO: 67;
[0086] (ppp) the sense strand comprises a nucleobase sequence according to SEQ ID NO: 164 and the antisense strand comprises a nucleobase sequence according to SEQ ID NO: 68;
[0087] (qqq) the sense strand comprises a nucleobase sequence according to SEQ ID NO: 165 and the antisense strand comprises a nucleobase sequence according to SEQ ID NO: 69;
[0088] (rrr) the sense strand comprises a nucleobase sequence according to SEQ ID NO: 166 and the antisense strand comprises a nucleobase sequence according to SEQ ID NO: 70;
[0089] (sss) the sense strand comprises a nucleobase sequence according to SEQ ID NO: 167 and the antisense strand comprises a nucleobase sequence according to SEQ ID NO: 71;
[0090] (ttt) the sense strand comprises a nucleobase sequence according to SEQ ID NO: 168 and the antisense strand comprises a nucleobase sequence according to SEQ ID NO: 72;
[0091] (uuu) the sense strand comprises a nucleobase sequence according to SEQ ID NO: 169 and the antisense strand comprises a nucleobase sequence according to SEQ ID NO: 73;
[0092] (vvv) the sense strand comprises a nucleobase sequence according to SEQ ID NO: 170 and the antisense strand comprises a nucleobase sequence according to SEQ ID NO: 74;
[0093] (www) the sense strand comprises a nucleobase sequence according to SEQ ID NO: 171 and the antisense strand comprises a nucleobase sequence according to SEQ ID NO: 75;
[0094] (xxx) the sense strand comprises a nucleobase sequence according to SEQ ID NO: 172 and the antisense strand comprises a nucleobase sequence according to SEQ ID NO: 76;
[0095] (yyy) the sense strand comprises a nucleobase sequence according to SEQ ID NO: 173 and the antisense strand comprises a nucleobase sequence according to SEQ ID NO: 77;
[0096] (zzz) the sense strand comprises a nucleobase sequence according to SEQ ID NO: 174 and the antisense strand comprises a nucleobase sequence according to SEQ ID NO: 78;
[0097] (aaaa) the sense strand comprises a nucleobase sequence according to SEQ ID NO: 175 and the antisense strand comprises a nucleobase sequence according to SEQ ID NO: 79;
[0098] (bbbb) the sense strand comprises a nucleobase sequence according to SEQ ID NO: 176 and the antisense strand comprises a nucleobase sequence according to SEQ ID NO: 80;
[0099] (cccc) the sense strand comprises a nucleobase sequence according to SEQ ID NO: 177 and the antisense strand comprises a nucleobase sequence according to SEQ ID NO: 81;
[0100] (dddd) the sense strand comprises a nucleobase sequence according to SEQ ID NO: 178 and the antisense strand comprises a nucleobase sequence according to SEQ ID NO: 82;
[0101] (eeee) the sense strand comprises a nucleobase sequence according to SEQ ID NO: 179 and the antisense strand comprises a nucleobase sequence according to SEQ ID NO: 83;
[0102] (ffff) the sense strand comprises a nucleobase sequence according to SEQ ID NO: 180 and the antisense strand comprises a nucleobase sequence according to SEQ ID NO: 84;
[0103] (gggg) the sense strand comprises a nucleobase sequence according to SEQ ID NO: 181 and the antisense strand comprises a nucleobase sequence according to SEQ ID NO: 85;
[0104] (hhhh) the sense strand comprises a nucleobase sequence according to SEQ ID NO: 182 and the antisense strand comprises a nucleobase sequence according to SEQ ID NO: 86;
[0105] (iiii) the sense strand comprises a nucleobase sequence according to SEQ ID NO: 183 and the antisense strand comprises a nucleobase sequence according to SEQ ID NO: 87;
[0106] (jjjj) the sense strand comprises a nucleobase sequence according to SEQ ID NO: 184 and the antisense strand comprises a nucleobase sequence according to SEQ ID NO: 88;
[0107] (kkkk) the sense strand comprises a nucleobase sequence according to SEQ ID NO: 185 and the antisense strand comprises a nucleobase sequence according to SEQ ID NO: 89;
[0108] (llll) the sense strand comprises a nucleobase sequence according to SEQ ID NO: 186 and the antisense strand comprises a nucleobase sequence according to SEQ ID NO: 90;
[0109] (mmmm) the sense strand comprises a nucleobase sequence according to SEQ ID NO: 187 and the antisense strand comprises a nucleobase sequence according to SEQ ID NO: 91;
[0110] (nnnn) the sense strand comprises a nucleobase sequence according to SEQ ID NO: 188 and the antisense strand comprises a nucleobase sequence according to SEQ ID NO: 92;
[0111] (oooo) the sense strand comprises a nucleobase sequence according to SEQ ID NO: 189 and the antisense strand comprises a nucleobase sequence according to SEQ ID NO: 93;
[0112] (pppp) the sense strand comprises a nucleobase sequence according to SEQ ID NO: 190 and the antisense strand comprises a nucleobase sequence according to SEQ ID NO: 94;
[0113] (qqqq) the sense strand comprises a nucleobase sequence according to SEQ ID NO: 191 and the antisense strand comprises a nucleobase sequence according to SEQ ID NO: 95; or
[0114] (rrrr) the sense strand comprises a nucleobase sequence according to SEQ ID NO: 192 and the antisense strand comprises a nucleobase sequence according to SEQ ID NO: 96.

[0115] In some implementations, (a) the sense strand comprises a nucleobase sequence according to SEQ ID NO: 112 and the antisense strand comprises a nucleobase sequence according to SEQ ID NO: 16;
[0116] (b) the sense strand comprises a nucleobase sequence according to SEQ ID NO: 131 and the antisense strand comprises a nucleobase sequence according to SEQ ID NO: 35;
[0117] (c) the sense strand comprises a nucleobase sequence according to SEQ ID NO: 148 and the antisense strand comprises a nucleobase sequence according to SEQ ID NO: 52;
[0118] (d) the sense strand comprises a nucleobase sequence according to SEQ ID NO: 180 and the antisense strand comprises a nucleobase sequence according to SEQ ID NO: 84;
[0119] (e) the sense strand comprises a nucleobase sequence according to SEQ ID NO: 182 and the antisense strand comprises a nucleobase sequence according to SEQ ID NO: 86;
[0120] (f) the sense strand comprises a nucleobase sequence according to SEQ ID NO: 185 and the antisense strand comprises a nucleobase sequence according to SEQ ID NO: 89; or
[0121] (g) the sense strand comprises a nucleobase sequence according to SEQ ID NO: 186 and the antisense strand comprises a nucleobase sequence according to SEQ ID NO: 90.

[0122] In some implementations, (a) the sense strand comprises a modified nucleotide sequence according to SEQ ID NO: 289 and the antisense strand comprises a modified nucleotide sequence according to SEQ ID NO: 193;
[0123] (b) the sense strand comprises a modified nucleotide sequence according to SEQ ID NO: 290 and the antisense strand comprises a modified nucleotide sequence according to SEQ ID NO: 194;
[0124] (c) the sense strand comprises a modified nucleotide sequence according to SEQ ID NO: 291 and the antisense strand comprises a modified nucleotide sequence according to SEQ ID NO: 195;
[0125] (d) the sense strand comprises a modified nucleotide sequence according to SEQ ID NO: 292 and the antisense strand comprises a modified nucleotide sequence according to SEQ ID NO: 196;
[0126] (e) the sense strand comprises a modified nucleotide sequence according to SEQ ID NO: 293 and the antisense strand comprises a modified nucleotide sequence according to SEQ ID NO: 197;
[0127] (f) the sense strand comprises a modified nucleotide sequence according to SEQ ID NO: 294 and the antisense strand comprises a modified nucleotide sequence according to SEQ ID NO: 198;
[0128] (g) the sense strand comprises a modified nucleotide sequence according to SEQ ID NO: 295 and the antisense strand comprises a modified nucleotide sequence according to SEQ ID NO: 199;
[0129] (h) the sense strand comprises a modified nucleotide sequence according to SEQ ID NO: 296 and the antisense strand comprises a modified nucleotide sequence according to SEQ ID NO: 200;
[0130] (i) the sense strand comprises a modified nucleotide sequence according to SEQ ID NO: 297 and the antisense strand comprises a modified nucleotide sequence according to SEQ ID NO: 201;
[0131] (j) the sense strand comprises a modified nucleotide sequence according to SEQ ID NO: 298 and the antisense strand comprises a modified nucleotide sequence according to SEQ ID NO: 202;
[0132] (k) the sense strand comprises a modified nucleotide sequence according to SEQ ID NO: 299 and the antisense strand comprises a modified nucleotide sequence according to SEQ ID NO: 203;
[0133] (l) the sense strand comprises a modified nucleotide sequence according to SEQ ID NO: 300 and the antisense strand comprises a modified nucleotide sequence according to SEQ ID NO: 204;
[0134] (m) the sense strand comprises a modified nucleotide sequence according to SEQ ID NO: 301 and the antisense strand comprises a modified nucleotide sequence according to SEQ ID NO: 205;
[0135] (n) the sense strand comprises a modified nucleotide sequence according to SEQ ID NO: 302 and the antisense strand comprises a modified nucleotide sequence according to SEQ ID NO: 206;
[0136] (o) the sense strand comprises a modified nucleotide sequence according to SEQ ID NO: 303 and the antisense strand comprises a modified nucleotide sequence according to SEQ ID NO: 207;
[0137] (p) the sense strand comprises a modified nucleotide sequence according to SEQ ID NO: 304 and the antisense strand comprises a modified nucleotide sequence according to SEQ ID NO: 208;
[0138] (q) the sense strand comprises a modified nucleotide sequence according to SEQ ID NO: 305 and the antisense strand comprises a modified nucleotide sequence according to SEQ ID NO: 209;
[0139] (r) the sense strand comprises a modified nucleotide sequence according to SEQ ID NO: 306 and the antisense strand comprises a modified nucleotide sequence according to SEQ ID NO: 210;
[0140] (s) the sense strand comprises a modified nucleotide sequence according to SEQ ID NO: 307 and the antisense strand comprises a modified nucleotide sequence according to SEQ ID NO: 211;
[0141] (t) the sense strand comprises a modified nucleotide sequence according to SEQ ID NO: 308 and the antisense strand comprises a modified nucleotide sequence according to SEQ ID NO: 212;
[0142] (u) the sense strand comprises a modified nucleotide sequence according to SEQ ID NO: 309 and the antisense strand comprises a modified nucleotide sequence according to SEQ ID NO: 213;
[0143] (v) the sense strand comprises a modified nucleotide sequence according to SEQ ID NO: 310 and the antisense strand comprises a modified nucleotide sequence according to SEQ ID NO: 214;
[0144] (w) the sense strand comprises a modified nucleotide sequence according to SEQ ID NO: 311 and the antisense strand comprises a modified nucleotide sequence according to SEQ ID NO: 215;
[0145] (x) the sense strand comprises a modified nucleotide sequence according to SEQ ID NO: 312 and the antisense strand comprises a modified nucleotide sequence according to SEQ ID NO: 216;
[0146] (y) the sense strand comprises a modified nucleotide sequence according to SEQ ID NO: 313 and the antisense strand comprises a modified nucleotide sequence according to SEQ ID NO: 217;
[0147] (z) the sense strand comprises a modified nucleotide sequence according to SEQ ID NO: 314 and the antisense strand comprises a modified nucleotide sequence according to SEQ ID NO: 218;
[0148] (aa) the sense strand comprises a modified nucleotide sequence according to SEQ ID NO: 315 and the antisense strand comprises a modified nucleotide sequence according to SEQ ID NO: 219;
[0149] (bb) the sense strand comprises a modified nucleotide sequence according to SEQ ID NO: 316 and the antisense strand comprises a modified nucleotide sequence according to SEQ ID NO: 220;
[0150] (cc) the sense strand comprises a modified nucleotide sequence according to SEQ ID NO: 317 and the antisense strand comprises a modified nucleotide sequence according to SEQ ID NO: 221;
[0151] (dd) the sense strand comprises a modified nucleotide sequence according to SEQ ID NO: 318 and the antisense strand comprises a modified nucleotide sequence according to SEQ ID NO: 222;
[0152] (ee) the sense strand comprises a modified nucleotide sequence according to SEQ ID NO: 319 and the antisense strand comprises a modified nucleotide sequence according to SEQ ID NO: 223;
[0153] (ff) the sense strand comprises a modified nucleotide sequence according to SEQ ID NO: 320 and the antisense strand comprises a modified nucleotide sequence according to SEQ ID NO: 224;
[0154] (gg) the sense strand comprises a modified nucleotide sequence according to SEQ ID NO: 321 and the antisense strand comprises a modified nucleotide sequence according to SEQ ID NO: 225;
[0155] (hh) the sense strand comprises a modified nucleotide sequence according to SEQ ID NO: 322 and the antisense strand comprises a modified nucleotide sequence according to SEQ ID NO: 226;
[0156] (ii) the sense strand comprises a modified nucleotide sequence according to SEQ ID NO: 323 and the antisense strand comprises a modified nucleotide sequence according to SEQ ID NO: 227;
[0157] (jj) the sense strand comprises a modified nucleotide sequence according to SEQ ID NO: 324 and the antisense strand comprises a modified nucleotide sequence according to SEQ ID NO: 228;
[0158] (kk) the sense strand comprises a modified nucleotide sequence according to SEQ ID NO: 325 and the antisense strand comprises a modified nucleotide sequence according to SEQ ID NO: 229;
[0159] (ll) the sense strand comprises a modified nucleotide sequence according to SEQ ID NO: 326 and the antisense strand comprises a modified nucleotide sequence according to SEQ ID NO: 230;
[0160] (mm) the sense strand comprises a modified nucleotide sequence according to SEQ ID NO: 327 and the antisense strand comprises a modified nucleotide sequence according to SEQ ID NO: 231;
[0161] (nn) the sense strand comprises a modified nucleotide sequence according to SEQ ID NO: 328 and the antisense strand comprises a modified nucleotide sequence according to SEQ ID NO: 232;
[0162] (oo) the sense strand comprises a modified nucleotide sequence according to SEQ ID NO: 329 and the antisense strand comprises a modified nucleotide sequence according to SEQ ID NO: 233;
[0163] (pp) the sense strand comprises a modified nucleotide sequence according to SEQ ID NO: 330 and the antisense strand comprises a modified nucleotide sequence according to SEQ ID NO: 234;
[0164] (qq) the sense strand comprises a modified nucleotide sequence according to SEQ ID NO: 331 and the antisense strand comprises a modified nucleotide sequence according to SEQ ID NO: 235;
[0165] (rr) the sense strand comprises a modified nucleotide sequence according to SEQ ID NO: 332 and the antisense strand comprises a modified nucleotide sequence according to SEQ ID NO: 236;
[0166] (ss) the sense strand comprises a modified nucleotide sequence according to SEQ ID NO: 333 and the antisense strand comprises a modified nucleotide sequence according to SEQ ID NO: 237;
[0167] (tt) the sense strand comprises a modified nucleotide sequence according to SEQ ID NO: 334 and the antisense strand comprises a modified nucleotide sequence according to SEQ ID NO: 238;
[0168] (uu) the sense strand comprises a modified nucleotide sequence according to SEQ ID NO: 335 and the antisense strand comprises a modified nucleotide sequence according to SEQ ID NO: 239;
[0169] (vv) the sense strand comprises a modified nucleotide sequence according to SEQ ID NO: 336 and the antisense strand comprises a modified nucleotide sequence according to SEQ ID NO: 240;
[0170] (ww) the sense strand comprises a modified nucleotide sequence according to SEQ ID NO: 337 and the antisense strand comprises a modified nucleotide sequence according to SEQ ID NO: 241;
[0171] (xx) the sense strand comprises a modified nucleotide sequence according to SEQ ID NO: 338 and the antisense strand comprises a modified nucleotide sequence according to SEQ ID NO: 242;
[0172] (yy) the sense strand comprises a modified nucleotide sequence according to SEQ ID NO: 339 and the antisense strand comprises a modified nucleotide sequence according to SEQ ID NO: 243;
[0173] (zz) the sense strand comprises a modified nucleotide sequence according to SEQ ID NO: 340 and the antisense strand comprises a modified nucleotide sequence according to SEQ ID NO: 244;
[0174] (aaa) the sense strand comprises a modified nucleotide sequence according to SEQ ID NO: 341 and the antisense strand comprises a modified nucleotide sequence according to SEQ ID NO: 245;
[0175] (bbb) the sense strand comprises a modified nucleotide sequence according to SEQ ID NO: 342 and the antisense strand comprises a modified nucleotide sequence according to SEQ ID NO: 246;
[0176] (ccc) the sense strand comprises a modified nucleotide sequence according to SEQ ID NO: 343 and the antisense strand comprises a modified nucleotide sequence according to SEQ ID NO: 247;
[0177] (ddd) the sense strand comprises a modified nucleotide sequence according to SEQ ID NO: 344 and the antisense strand comprises a modified nucleotide sequence according to SEQ ID NO: 248;
[0178] (eee) the sense strand comprises a modified nucleotide sequence according to SEQ ID NO: 345 and the antisense strand comprises a modified nucleotide sequence according to SEQ ID NO: 249;
[0179] (fff) the sense strand comprises a modified nucleotide sequence according to SEQ ID NO: 346 and the antisense strand comprises a modified nucleotide sequence according to SEQ ID NO: 250;
[0180] (ggg) the sense strand comprises a modified nucleotide sequence according to SEQ ID NO: 347 and the antisense strand comprises a modified nucleotide sequence according to SEQ ID NO: 251;
[0181] (hhh) the sense strand comprises a modified nucleotide sequence according to SEQ ID NO: 348 and the antisense strand comprises a modified nucleotide sequence according to SEQ ID NO: 252;
[0182] (iii) the sense strand comprises a modified nucleotide sequence according to SEQ ID NO: 349 and the antisense strand comprises a modified nucleotide sequence according to SEQ ID NO: 253;
[0183] (jjj) the sense strand comprises a modified nucleotide sequence according to SEQ ID NO: 350 and the antisense strand comprises a modified nucleotide sequence according to SEQ ID NO: 254;
[0184] (kkk) the sense strand comprises a modified nucleotide sequence according to SEQ ID NO: 351 and the antisense strand comprises a modified nucleotide sequence according to SEQ ID NO: 255;
[0185] (lll) the sense strand comprises a modified nucleotide sequence according to SEQ ID NO: 352 and the antisense strand comprises a modified nucleotide sequence according to SEQ ID NO: 256;
[0186] (mmm) the sense strand comprises a modified nucleotide sequence according to SEQ ID NO: 353 and the antisense strand comprises a modified nucleotide sequence according to SEQ ID NO: 257;
[0187] (nnn) the sense strand comprises a modified nucleotide sequence according to SEQ ID NO: 354 and the antisense strand comprises a modified nucleotide sequence according to SEQ ID NO: 258;
[0188] (ooo) the sense strand comprises a modified nucleotide sequence according to SEQ ID NO: 355 and the antisense strand comprises a modified nucleotide sequence according to SEQ ID NO: 259;
[0189] (ppp) the sense strand comprises a modified nucleotide sequence according to SEQ ID NO: 356 and the antisense strand comprises a modified nucleotide sequence according to SEQ ID NO: 260;
[0190] (qqq) the sense strand comprises a modified nucleotide sequence according to SEQ ID NO: 357 and the antisense strand comprises a modified nucleotide sequence according to SEQ ID NO: 261;
[0191] (rrr) the sense strand comprises a modified nucleotide sequence according to SEQ ID NO: 358 and the antisense strand comprises a modified nucleotide sequence according to SEQ ID NO: 262;
[0192] (sss) the sense strand comprises a modified nucleotide sequence according to SEQ ID NO: 359 and the antisense strand comprises a modified nucleotide sequence according to SEQ ID NO: 263;
[0193] (ttt) the sense strand comprises a modified nucleotide sequence according to SEQ ID NO: 360 and the antisense strand comprises a modified nucleotide sequence according to SEQ ID NO: 264;
[0194] (uuu) the sense strand comprises a modified nucleotide sequence according to SEQ ID NO: 361 and the antisense strand comprises a modified nucleotide sequence according to SEQ ID NO: 265;
[0195] (vvv) the sense strand comprises a modified nucleotide sequence according to SEQ ID NO: 362 and the antisense strand comprises a modified nucleotide sequence according to SEQ ID NO: 266;
[0196] (www) the sense strand comprises a modified nucleotide sequence according to SEQ ID NO: 363 and the antisense strand comprises a modified nucleotide sequence according to SEQ ID NO: 267;
[0197] (xxx) the sense strand comprises a modified nucleotide sequence according to SEQ ID NO: 364 and the antisense strand comprises a modified nucleotide sequence according to SEQ ID NO: 268;
[0198] (yyy) the sense strand comprises a modified nucleotide sequence according to SEQ ID NO: 365 and the antisense strand comprises a modified nucleotide sequence according to SEQ ID NO: 269;
[0199] (zzz) the sense strand comprises a modified nucleotide sequence according to SEQ ID NO: 366 and the antisense strand comprises a modified nucleotide sequence according to SEQ ID NO: 270;
[0200] (aaaa) the sense strand comprises a modified nucleotide sequence according to SEQ ID NO: 367 and the antisense strand comprises a modified nucleotide sequence according to SEQ ID NO: 271;
[0201] (bbbb) the sense strand comprises a modified nucleotide sequence according to SEQ ID NO: 368 and the antisense strand comprises a modified nucleotide sequence according to SEQ ID NO: 272;
[0202] (cccc) the sense strand comprises a modified nucleotide sequence according to SEQ ID NO: 369 and the antisense strand comprises a modified nucleotide sequence according to SEQ ID NO: 273;
[0203] (dddd) the sense strand comprises a modified nucleotide sequence according to SEQ ID NO: 370 and the antisense strand comprises a modified nucleotide sequence according to SEQ ID NO: 274;
[0204] (eeee) the sense strand comprises a modified nucleotide sequence according to SEQ ID NO: 371 and the antisense strand comprises a modified nucleotide sequence according to SEQ ID NO: 275;
[0205] (ffff) the sense strand comprises a modified nucleotide sequence according to SEQ ID NO: 372 and the antisense strand comprises a modified nucleotide sequence according to SEQ ID NO: 276;
[0206] (gggg) the sense strand comprises a modified nucleotide sequence according to SEQ ID NO: 373 and the antisense strand comprises a modified nucleotide sequence according to SEQ ID NO: 277;
[0207] (hhhh) the sense strand comprises a modified nucleotide sequence according to SEQ ID NO: 374 and the antisense strand comprises a modified nucleotide sequence according to SEQ ID NO: 278;
[0208] (iiii) the sense strand comprises a modified nucleotide sequence according to SEQ ID NO: 375 and the antisense strand comprises a modified nucleotide sequence according to SEQ ID NO: 279;
[0209] (jjjj) the sense strand comprises a modified nucleotide sequence according to SEQ ID NO: 376 and the antisense strand comprises a modified nucleotide sequence according to SEQ ID NO: 280;
[0210] (kkkk) the sense strand comprises a modified nucleotide sequence according to SEQ ID NO: 377 and the antisense strand comprises a modified nucleotide sequence according to SEQ ID NO: 281;
[0211] (llll) the sense strand comprises a modified nucleotide sequence according to SEQ ID NO: 378 and the antisense strand comprises a modified nucleotide sequence according to SEQ ID NO: 282;
[0212] (mmmm) the sense strand comprises a modified nucleotide sequence according to SEQ ID NO: 379 and the antisense strand comprises a modified nucleotide sequence according to SEQ ID NO: 283;
[0213] (nnnn) the sense strand comprises a modified nucleotide sequence according to SEQ ID NO: 380 and the antisense strand comprises a modified nucleotide sequence according to SEQ ID NO: 284;
[0214] (oooo) the sense strand comprises a modified nucleotide sequence according to SEQ ID NO: 381 and the antisense strand comprises a modified nucleotide sequence according to SEQ ID NO: 285;
[0215] (pppp) the sense strand comprises a modified nucleotide sequence according to SEQ ID NO: 382 and the antisense strand comprises a modified nucleotide sequence according to SEQ ID NO: 286;
[0216] (qqqq) the sense strand comprises a modified nucleotide sequence according to SEQ ID NO: 383 and the antisense strand comprises a modified nucleotide sequence according to SEQ ID NO: 287;
[0217] (rrrr) the sense strand comprises a modified nucleotide sequence according to SEQ ID NO: 384 and the antisense strand comprises a modified nucleotide sequence according to SEQ ID NO: 288;
[0218] (ssss) the sense strand comprises a modified nucleotide sequence according to SEQ ID NO: 385 and the antisense strand comprises a modified nucleotide sequence according to SEQ ID NO: 193;
[0219] (tttt) the sense strand comprises a modified nucleotide sequence according to SEQ ID NO: 386 and the antisense strand comprises a modified nucleotide sequence according to SEQ ID NO: 194;
[0220] (uuuu) the sense strand comprises a modified nucleotide sequence according to SEQ ID NO: 387 and the antisense strand comprises a modified nucleotide sequence according to SEQ ID NO: 195;
[0221] (vvvv) the sense strand comprises a modified nucleotide sequence according to SEQ ID NO: 388 and the antisense strand comprises a modified nucleotide sequence according to SEQ ID NO: 196;
[0222] (wwww) the sense strand comprises a modified nucleotide sequence according to SEQ ID NO: 389 and the antisense strand comprises a modified nucleotide sequence according to SEQ ID NO: 197;
[0223] (xxxx) the sense strand comprises a modified nucleotide sequence according to SEQ ID NO: 390 and the antisense strand comprises a modified nucleotide sequence according to SEQ ID NO: 198;
[0224] (yyyy) the sense strand comprises a modified nucleotide sequence according to SEQ ID NO: 391 and the antisense strand comprises a modified nucleotide sequence according to SEQ ID NO: 199;
[0225] (zzzz) the sense strand comprises a modified nucleotide sequence according to SEQ ID NO: 392 and the antisense strand comprises a modified nucleotide sequence according to SEQ ID NO: 200;
[0226] (aaaaa) the sense strand comprises a modified nucleotide sequence according to SEQ ID NO: 393 and the antisense strand comprises a modified nucleotide sequence according to SEQ ID NO: 201;
[0227] (bbbbb) the sense strand comprises a modified nucleotide sequence according to SEQ ID NO: 394 and the antisense strand comprises a modified nucleotide sequence according to SEQ ID NO: 202;
[0228] (ccccc) the sense strand comprises a modified nucleotide sequence according to SEQ ID NO: 395 and the antisense strand comprises a modified nucleotide sequence according to SEQ ID NO: 203;
[0229] (ddddd) the sense strand comprises a modified nucleotide sequence according to SEQ ID NO: 396 and the antisense strand comprises a modified nucleotide sequence according to SEQ ID NO: 204;
[0230] (eeeee) the sense strand comprises a modified nucleotide sequence according to SEQ ID NO: 397 and the antisense strand comprises a modified nucleotide sequence according to SEQ ID NO: 205;
[0231] (fffff) the sense strand comprises a modified nucleotide sequence according to SEQ ID NO: 398 and the antisense strand comprises a modified nucleotide sequence according to SEQ ID NO: 206;
[0232] (ggggg) the sense strand comprises a modified nucleotide sequence according to SEQ ID NO: 399 and the antisense strand comprises a modified nucleotide sequence according to SEQ ID NO: 207;
[0233] (hhhhh) the sense strand comprises a modified nucleotide sequence according to SEQ ID NO: 400 and the antisense strand comprises a modified nucleotide sequence according to SEQ ID NO: 208;
[0234] (iiiii) the sense strand comprises a modified nucleotide sequence according to SEQ ID NO: 401 and the antisense strand comprises a modified nucleotide sequence according to SEQ ID NO: 209;
[0235] (jjjjj) the sense strand comprises a modified nucleotide sequence according to SEQ ID NO: 402 and the antisense strand comprises a modified nucleotide sequence according to SEQ ID NO: 210;
[0236] (kkkkk) the sense strand comprises a modified nucleotide sequence according to SEQ ID NO: 403 and the antisense strand comprises a modified nucleotide sequence according to SEQ ID NO: 211;
[0237] (lllll) the sense strand comprises a modified nucleotide sequence according to SEQ ID NO: 404 and the antisense strand comprises a modified nucleotide sequence according to SEQ ID NO: 212;
[0238] (mmmmm) the sense strand comprises a modified nucleotide sequence according to SEQ ID NO: 405 and the antisense strand comprises a modified nucleotide sequence according to SEQ ID NO: 213;
[0239] (nnnnn) the sense strand comprises a modified nucleotide sequence according to SEQ ID NO: 406 and the antisense strand comprises a modified nucleotide sequence according to SEQ ID NO: 214;
[0240] (ooooo) the sense strand comprises a modified nucleotide sequence according to SEQ ID NO: 407 and the antisense strand comprises a modified nucleotide sequence according to SEQ ID NO: 215;
[0241] (ppppp) the sense strand comprises a modified nucleotide sequence according to SEQ ID NO: 408 and the antisense strand comprises a modified nucleotide sequence according to SEQ ID NO: 216;
[0242] (qqqqq) the sense strand comprises a modified nucleotide sequence according to SEQ ID NO: 409 and the antisense strand comprises a modified nucleotide sequence according to SEQ ID NO: 217;
[0243] (rrrrr) the sense strand comprises a modified nucleotide sequence according to SEQ ID NO: 410 and the antisense strand comprises a modified nucleotide sequence according to SEQ ID NO: 218;
[0244] (sssss) the sense strand comprises a modified nucleotide sequence according to SEQ ID NO: 411 and the antisense strand comprises a modified nucleotide sequence according to SEQ ID NO: 219;
[0245] (ttttt) the sense strand comprises a modified nucleotide sequence according to SEQ ID NO: 412 and the antisense strand comprises a modified nucleotide sequence according to SEQ ID NO: 220;
[0246] (uuuuu) the sense strand comprises a modified nucleotide sequence according to SEQ ID NO: 413 and the antisense strand comprises a modified nucleotide sequence according to SEQ ID NO: 221;
[0247] (vvvvv) the sense strand comprises a modified nucleotide sequence according to SEQ ID NO: 414 and the antisense strand comprises a modified nucleotide sequence according to SEQ ID NO: 222;
[0248] (wwwww) the sense strand comprises a modified nucleotide sequence according to SEQ ID NO: 415 and the antisense strand comprises a modified nucleotide sequence according to SEQ ID NO: 223;
[0249] (xxxxx) the sense strand comprises a modified nucleotide sequence according to SEQ ID NO: 416 and the antisense strand comprises a modified nucleotide sequence according to SEQ ID NO: 224;
[0250] (yyyyy) the sense strand comprises a modified nucleotide sequence according to SEQ ID NO: 417 and the antisense strand comprises a modified nucleotide sequence according to SEQ ID NO: 225;
[0251] (zzzzz) the sense strand comprises a modified nucleotide sequence according to SEQ ID NO: 418 and the antisense strand comprises a modified nucleotide sequence according to SEQ ID NO: 226;
[0252] (aaaaaa) the sense strand comprises a modified nucleotide sequence according to SEQ ID NO: 419 and the antisense strand comprises a modified nucleotide sequence according to SEQ ID NO: 227;
[0253] (bbbbbb) the sense strand comprises a modified nucleotide sequence according to SEQ ID NO: 420 and the antisense strand comprises a modified nucleotide sequence according to SEQ ID NO: 228;
[0254] (cccccc) the sense strand comprises a modified nucleotide sequence according to SEQ ID NO: 421 and the antisense strand comprises a modified nucleotide sequence according to SEQ ID NO: 229;
[0255] (dddddd) the sense strand comprises a modified nucleotide sequence according to SEQ ID NO: 422 and the antisense strand comprises a modified nucleotide sequence according to SEQ ID NO: 230;
[0256] (eeeeee) the sense strand comprises a modified nucleotide sequence according to SEQ ID NO: 423 and the antisense strand comprises a modified nucleotide sequence according to SEQ ID NO: 231;
[0257] (ffffff) the sense strand comprises a modified nucleotide sequence according to SEQ ID NO: 424 and the antisense strand comprises a modified nucleotide sequence according to SEQ ID NO: 232;
[0258] (gggggg) the sense strand comprises a modified nucleotide sequence according to SEQ ID NO: 425 and the antisense strand comprises a modified nucleotide sequence according to SEQ ID NO: 233;
[0259] (hhhhhh) the sense strand comprises a modified nucleotide sequence according to SEQ ID NO: 426 and the antisense strand comprises a modified nucleotide sequence according to SEQ ID NO: 234;
[0260] (iiiiii) the sense strand comprises a modified nucleotide sequence according to SEQ ID NO: 427 and the antisense strand comprises a modified nucleotide sequence according to SEQ ID NO: 235;
[0261] (jjjjjj) the sense strand comprises a modified nucleotide sequence according to SEQ ID NO: 428 and the antisense strand comprises a modified nucleotide sequence according to SEQ ID NO: 236;
[0262] (kkkkkk) the sense strand comprises a modified nucleotide sequence according to SEQ ID NO: 429 and the antisense strand comprises a modified nucleotide sequence according to SEQ ID NO: 237;
[0263] (llllll) the sense strand comprises a modified nucleotide sequence according to SEQ ID NO: 430 and the antisense strand comprises a modified nucleotide sequence according to SEQ ID NO: 238;
[0264] (mmmmmm) the sense strand comprises a modified nucleotide sequence according to SEQ ID NO: 431 and the antisense strand comprises a modified nucleotide sequence according to SEQ ID NO: 239;
[0265] (nnnnnn) the sense strand comprises a modified nucleotide sequence according to SEQ ID NO: 432 and the antisense strand comprises a modified nucleotide sequence according to SEQ ID NO: 240;
[0266] (oooooo) the sense strand comprises a modified nucleotide sequence according to SEQ ID NO: 433 and the antisense strand comprises a modified nucleotide sequence according to SEQ ID NO: 241;
[0267] (pppppp) the sense strand comprises a modified nucleotide sequence according to SEQ ID NO: 434 and the antisense strand comprises a modified nucleotide sequence according to SEQ ID NO: 242;
[0268] (qqqqqq) the sense strand comprises a modified nucleotide sequence according to SEQ ID NO: 435 and the antisense strand comprises a modified nucleotide sequence according to SEQ ID NO: 243;
[0269] (rrrrrr) the sense strand comprises a modified nucleotide sequence according to SEQ ID NO: 436 and the antisense strand comprises a modified nucleotide sequence according to SEQ ID NO: 244;
[0270] (ssssss) the sense strand comprises a modified nucleotide sequence according to SEQ ID NO: 437 and the antisense strand comprises a modified nucleotide sequence according to SEQ ID NO: 245;
[0271] (tttttt) the sense strand comprises a modified nucleotide sequence according to SEQ ID NO: 438 and the antisense strand comprises a modified nucleotide sequence according to SEQ ID NO: 246;
[0272] (uuuuuu) the sense strand comprises a modified nucleotide sequence according to SEQ ID NO: 439 and the antisense strand comprises a modified nucleotide sequence according to SEQ ID NO: 247;
[0273] (vvvvvv) the sense strand comprises a modified nucleotide sequence according to SEQ ID NO: 440 and the antisense strand comprises a modified nucleotide sequence according to SEQ ID NO: 248;
[0274] (wwwwww) the sense strand comprises a modified nucleotide sequence according to SEQ ID NO: 441 and the antisense strand comprises a modified nucleotide sequence according to SEQ ID NO: 249;
[0275] (xxxxxx) the sense strand comprises a modified nucleotide sequence according to SEQ ID NO: 442 and the antisense strand comprises a modified nucleotide sequence according to SEQ ID NO: 250;
[0276] (yyyyyy) the sense strand comprises a modified nucleotide sequence according to SEQ ID NO: 443 and the antisense strand comprises a modified nucleotide sequence according to SEQ ID NO: 251;
[0277] (zzzzzz) the sense strand comprises a modified nucleotide sequence according to SEQ ID NO: 444 and the antisense strand comprises a modified nucleotide sequence according to SEQ ID NO: 252;
[0278] (aaaaaaa) the sense strand comprises a modified nucleotide sequence according to SEQ ID NO: 445 and the antisense strand comprises a modified nucleotide sequence according to SEQ ID NO: 253;
[0279] (bbbbbbb) the sense strand comprises a modified nucleotide sequence according to SEQ ID NO: 446 and the antisense strand comprises a modified nucleotide sequence according to SEQ ID NO: 254;
[0280] (ccccccc) the sense strand comprises a modified nucleotide sequence according to SEQ ID NO: 447 and the antisense strand comprises a modified nucleotide sequence according to SEQ ID NO: 255;
[0281] (ddddddd) the sense strand comprises a modified nucleotide sequence according to SEQ ID NO: 448 and the antisense strand comprises a modified nucleotide sequence according to SEQ ID NO: 256;
[0282] (eeeeeee) the sense strand comprises a modified nucleotide sequence according to SEQ ID NO: 449 and the antisense strand comprises a modified nucleotide sequence according to SEQ ID NO: 257;
[0283] (fffffff) the sense strand comprises a modified nucleotide sequence according to SEQ ID NO: 450 and the antisense strand comprises a modified nucleotide sequence according to SEQ ID NO: 258;
[0284] (ggggggg) the sense strand comprises a modified nucleotide sequence according to SEQ ID NO: 451 and the antisense strand comprises a modified nucleotide sequence according to SEQ ID NO: 259;
[0285] (hhhhhhh) the sense strand comprises a modified nucleotide sequence according to SEQ ID NO: 452 and the antisense strand comprises a modified nucleotide sequence according to SEQ ID NO: 260;
[0286] (iiiiii) the sense strand comprises a modified nucleotide sequence according to SEQ ID NO: 453 and the antisense strand comprises a modified nucleotide sequence according to SEQ ID NO: 261;
[0287] (jjjjjjj) the sense strand comprises a modified nucleotide sequence according to SEQ ID NO: 454 and the antisense strand comprises a modified nucleotide sequence according to SEQ ID NO: 262;
[0288] (kkkkkkk) the sense strand comprises a modified nucleotide sequence according to SEQ ID NO: 455 and the antisense strand comprises a modified nucleotide sequence according to SEQ ID NO: 263;
[0289] (lllllll) the sense strand comprises a modified nucleotide sequence according to SEQ ID NO: 456 and the antisense strand comprises a modified nucleotide sequence according to SEQ ID NO: 264;
[0290] (mmmmmmm) the sense strand comprises a modified nucleotide sequence according to SEQ ID NO: 457 and the antisense strand comprises a modified nucleotide sequence according to SEQ ID NO: 265;
[0291] (nnnnnnn) the sense strand comprises a modified nucleotide sequence according to SEQ ID NO: 458 and the antisense strand comprises a modified nucleotide sequence according to SEQ ID NO: 266;
[0292] (ooooooo) the sense strand comprises a modified nucleotide sequence according to SEQ ID NO: 459 and the antisense strand comprises a modified nucleotide sequence according to SEQ ID NO: 267;
[0293] (ppppppp) the sense strand comprises a modified nucleotide sequence according to SEQ ID NO: 460 and the antisense strand comprises a modified nucleotide sequence according to SEQ ID NO: 268;
[0294] (qqqqqqq) the sense strand comprises a modified nucleotide sequence according to SEQ ID NO: 461 and the antisense strand comprises a modified nucleotide sequence according to SEQ ID NO: 269;
[0295] (rrrrrrrr) the sense strand comprises a modified nucleotide sequence according to SEQ ID NO: 462 and the antisense strand comprises a modified nucleotide sequence according to SEQ ID NO: 270;
[0296] (sssssss) the sense strand comprises a modified nucleotide sequence according to SEQ ID NO: 463 and the antisense strand comprises a modified nucleotide sequence according to SEQ ID NO: 271;
[0297] (ttttttt) the sense strand comprises a modified nucleotide sequence according to SEQ ID NO: 464 and the antisense strand comprises a modified nucleotide sequence according to SEQ ID NO: 272;
[0298] (uuuuuuu) the sense strand comprises a modified nucleotide sequence according to SEQ ID NO: 465 and the antisense strand comprises a modified nucleotide sequence according to SEQ ID NO: 273;
[0299] (vvvvvvv) the sense strand comprises a modified nucleotide sequence according to SEQ ID NO: 466 and the antisense strand comprises a modified nucleotide sequence according to SEQ ID NO: 274;
[0300] (wwwwwww) the sense strand comprises a modified nucleotide sequence according to SEQ ID NO: 467 and the antisense strand comprises a modified nucleotide sequence according to SEQ ID NO: 275;
[0301] (xxxxxxx) the sense strand comprises a modified nucleotide sequence according to SEQ ID NO: 468 and the antisense strand comprises a modified nucleotide sequence according to SEQ ID NO: 276;
[0302] (yyyyyyy) the sense strand comprises a modified nucleotide sequence according to SEQ ID NO: 469 and the antisense strand comprises a modified nucleotide sequence according to SEQ ID NO: 277;
[0303] (zzzzzzz) the sense strand comprises a modified nucleotide sequence according to SEQ ID NO: 470 and the antisense strand comprises a modified nucleotide sequence according to SEQ ID NO: 278;
[0304] (aaaaaaaa) the sense strand comprises a modified nucleotide sequence according to SEQ ID NO: 471 and the antisense strand comprises a modified nucleotide sequence according to SEQ ID NO: 279;
[0305] (bbbbbbbb) the sense strand comprises a modified nucleotide sequence according to SEQ ID NO: 472 and the antisense strand comprises a modified nucleotide sequence according to SEQ ID NO: 280;
[0306] (cccccccc) the sense strand comprises a modified nucleotide sequence according to SEQ ID NO: 473 and the antisense strand comprises a modified nucleotide sequence according to SEQ ID NO: 281;
[0307] (dddddddd) the sense strand comprises a modified nucleotide sequence according to SEQ ID NO: 474 and the antisense strand comprises a modified nucleotide sequence according to SEQ ID NO: 282;
[0308] (eeeeeeee) the sense strand comprises a modified nucleotide sequence according to SEQ ID NO: 475 and the antisense strand comprises a modified nucleotide sequence according to SEQ ID NO: 283;
[0309] (ffffffff) the sense strand comprises a modified nucleotide sequence according to SEQ ID NO: 476 and the antisense strand comprises a modified nucleotide sequence according to SEQ ID NO: 284;
[0310] (gggggggg) the sense strand comprises a modified nucleotide sequence according to SEQ ID NO: 477 and the antisense strand comprises a modified nucleotide sequence according to SEQ ID NO: 285;
[0311] (hhhhhhhh) the sense strand comprises a modified nucleotide sequence according to SEQ ID NO: 478 and the antisense strand comprises a modified nucleotide sequence according to SEQ ID NO: 286;
[0312] (iiiiiii) the sense strand comprises a modified nucleotide sequence according to SEQ ID NO: 479 and the antisense strand comprises a modified nucleotide sequence according to SEQ ID NO: 287; or
[0313] (jjjjjjjj) the sense strand comprises a modified nucleotide sequence according to SEQ ID NO: 480 and the antisense strand comprises a modified nucleotide sequence according to SEQ ID NO: 288.

[0314] In some implementations, (a) the sense strand comprises a modified nucleotide sequence according to SEQ ID NO: 400 and the antisense strand comprises a modified nucleotide sequence according to SEQ ID NO: 208; (b) the sense strand comprises a modified nucleotide sequence according to SEQ ID NO: 419 and the antisense strand comprises a modified nucleotide sequence according to SEQ ID NO: 227; (c) the sense strand comprises a modified nucleotide sequence according to SEQ ID NO: 436 and the antisense strand comprises a modified nucleotide sequence according to SEQ ID NO: 244; (d) the sense strand comprises a modified nucleotide sequence according to SEQ ID NO: 468 and the antisense strand comprises a modified nucleotide sequence according to SEQ ID NO: 276; (e) the sense strand comprises a modified nucleotide sequence according to SEQ ID NO: 470 and the antisense strand comprises a modified nucleotide sequence according to SEQ ID NO: 278; (f) the sense strand comprises a modified nucleotide sequence according to SEQ ID NO: 473 and the antisense strand comprises a modified nucleotide sequence according to SEQ ID NO: 281; or (g) the sense strand comprises a modified nucleotide sequence according to SEQ ID NO: 474 and the antisense strand comprises a modified nucleotide sequence according to SEQ ID NO: 282.

[0315] In some implementations, the RNAi agent comprises a targeting ligand comprising a structure according to Formula I:

[chemical structure]

[0316] wherein R is a linker conjugated to the wherein the targeting ligand is conjugated to the 3′ end of the sense strand, wherein R comprises a structure according to Formula III:

[chemical structure]

[0317] and wherein connection point C of Formula III is conjugated to Formula I, and connection point D of Formula III is conjugated to the 3′ end of the sense strand;
[0318] or wherein the RNAi agent comprises a targeting ligand comprising a structure according to Formula V:

[chemical structure]

[0319] In some implementations, the sense strand comprises a 3′ overhang of 1-5 nucleotides in length. In some implementations, the sense strand comprises a 5′ overhang of 1-5 nucleotides in length. In some implementations, the antisense strand comprises a 3′ overhang of 1-5 nucleotides in length. In some implementations, the antisense strand comprises a 5′ overhang of 1-5 nucleotides in length. In some implementations, the sense strand or the antisense strand comprises at least one modified nucleotide or at least one modified internucleoside linkage. In some implementations, the sense strand and or the antisense strand comprises a modified internucleoside linkage at a first, second, penultimate, or final internucleoside linkage position.

[0320] In some implementations, the at least one modified nucleotide or at least one modified internucleoside linkage comprises a 2′-O-methyl modified nucleotide, a nucleotide comprising a 5′-phosphorothioate group, a 2′-deoxy-2′-fluoro modified nucleotide, a 2′-deoxy-modified nucleotide, a locked nucleotide, an abasic nucleotide, deoxythymidine, an inverted deoxythymidine, a 2′-amino-modified nucleotide, a 2′-alkyl-modified nucleotide, a morpholino nucleotide, a phosphoramidate, or a non-natural base comprising nucleotide.

[0321] In some implementations, the targeting ligand is conjugated to the sense strand. In some implementations, the targeting ligand is conjugated to the 3′ end of the sense strand. In some implementations, the targeting ligand is conjugated to the 5′ end of the sense strand. In some implementations, the targeting ligand is conjugated to the antisense strand. In some implementations, the targeting ligand is conjugated to the 3′ end of the antisense strand. In some implementations, the targeting ligand is conjugated to the 5′ end of the antisense strand.

[0322] In some implementations, the targeting ligand comprises a galactose trimer. In some implementations, the targeting ligand comprises N-acetylgalactosamine (GalNAc). In some implementations, the targeting ligand comprises a structure according to Formula I:

[chemical structure]

wherein R is:
[0323] (i) the sense strand or the antisense strand; or
[0324] (ii) a linker conjugated to the sense strand or the antisense strand.

[0325] In some implementations, R is a linker conjugated to the sense strand or the antisense strand having a structure according to Formula III:

[chemical structure]

wherein:
[0326] (i) connection point C of Formula III is conjugated to Formula I, and connection point D of Formula III is conjugated to the sense strand or the antisense strand; or
[0327] (ii) connection point C of Formula III is conjugated to Formula I, and connection point D of Formula III is conjugated to a phosphate group which is conjugated to the sense strand or the antisense strand.

[0328] In some implementations, the RNAi agent comprises a targeting ligand and linker according to Formula V:

[chemical structure]

[0329] In some implementations, Formula III or the phosphate group is conjugated to the 3′ end or the 5′ end of the sense strand or the antisense strand. In some implementations, Formula III or the phosphate group is conjugated to an internal nucleotide or nucleoside base of the sense strand or the antisense strand.

[0330] In some implementations, the RNAi agent is an siRNA molecule. In some implementations, the RNAi agent is an shRNA molecule.

[0331] Described herein is a modified oligonucleotide consisting of 12 to 30 or 12 to 50 linked nucleosides, wherein the modified oligonucleotide has a nucleobase sequence comprising at least 12, at least 13, at least 14, at least 15, at least 16, at least 17, at least 18, at least 19, at least 20, at least 21, at least 22, at least 23, at least 24, or at least 25 contiguous nucleobases complementary to an equal length portion of SEQ ID NO: 481, and wherein the modified oligonucleotide comprises at least one synthetically modified internucleoside linkage or at least one synthetically modified sugar-phosphate backbone.

[0332] In some implementations, the modified oligonucleotide comprises a synthetically modified internucleoside linkage at a first, second, penultimate, or final internucleoside linkage position. In some implementations, the modified oligonucleotide comprises a 2′-O-methyl modified nucleotide, a nucleotide comprising a 5′-phosphorothioate group, a 2′-deoxy-2′-fluoro modified nucleotide, a 2′-deoxy-modified nucleotide, a locked nucleotide, an abasic nucleotide, deoxythymidine, an inverted deoxythymidine, a 2′-amino-modified nucleotide, a 2′-alkyl-modified nucleotide, a morpholino nucleotide, a phosphoramidate, or a non-natural base comprising nucleotide.

[0333] In some implementations, the modified oligonucleotide or a subsequence thereof differs by 0, 1, 2, 3, or 4 nucleotides from an equal length portion of any one of SEQ ID NOS: 193-288, wherein the subsequence is at least 14, 15, 16, 17, 18, 19, 20, 21, 22, or 23 bases in length. In some implementations, the modified oligonucleotide comprises, in order, nucleotides 1-23 of any one of SEQ ID NOS: 193-288. In some implementations, the modified oligonucleotide comprises a modified nucleotide sequence according to any one of SEQ ID NOS: 193-288. In some implementations, the modified oligonucleotide is conjugated to a targeting ligand that targets a hepatocyte. In some implementations, the modified oligonucleotide is conjugated to the targeting ligand conjugated to its 3′ end. In some implementations, the modified oligonucleotide is conjugated to the targeting ligand conjugated to its 5′ end.

[0334] In some implementations, the targeting ligand comprises a galactose trimer. In some implementations, the targeting ligand comprises N-acetylgalactosamine (GalNAc). In some implementations, the targeting ligand comprises a structure according to Formula I:

[chemical structure]

wherein R is:
[0335] (i) the modified oligonucleotide; or
[0336] (ii) a linker conjugated to the modified oligonucleotide.

[0337] In some implementations, R is a linker conjugated to the modified oligonucleotide having a structure according to Formula III:

[chemical structure]

wherein:
[0338] (i) connection point C of Formula III is conjugated to Formula I, and connection point D of Formula III is conjugated to the modified oligonucleotide; or
[0339] (ii) connection point C of Formula III is conjugated to Formula I, and connection point D of Formula III is conjugated to a phosphate group which is conjugated to the modified oligonucleotide.

[0340] In some implementations, Formula III or the phosphate group is conjugated to the 3′ end or the 5′ end of the modified oligonucleotide. In some implementations, Formula III or the phosphate group is conjugated to an internal nucleotide or nucleoside base of the modified oligonucleotide. In some implementations, the modified oligonucleotide comprises a targeting ligand and linker according to Formula V:

[chemical structure]

[0341] In some implementations, the modified oligonucleotide is an siRNA molecule. In some implementations, the modified oligonucleotide is an shRNA molecule.

[0342] Described herein is an oligomeric duplex comprising: (a) a first modified oligonucleotide consisting of 12 to 30 or 12 to 50 linked nucleosides, wherein a nucleobase sequence of the first modified oligonucleotide comprises at least 12, at least 13, at least 14, at least 15, at least 16, at least 17, at least 18, at least 19, at least 20, at least 21, at least 22, at least 23, at least 24, or at least 25 contiguous nucleobases that are at least 80%, 81%, 82%, 83%, 84%, 85%, 86%, 87%, 88%, 89%, 90%, 91%, 92%, 93%, 94%, 95%, 96%, 97%, 98%, 99%, or 100% complementary to an equal length portion of SEQ ID NO: 481; and (b) a second modified oligonucleotide consisting of 12 to 30 or 12 to 50 linked nucleosides, wherein a nucleobase sequence of the second modified oligonucleotide comprises a complementary region of at least 8 nucleobases that is at least 90% complementary to the nucleobase sequence of an equal length portion of the first modified oligonucleotide.

[0343] In some implementations, the first modified oligonucleotide and/or second modified oligonucleotide comprises at least one synthetically modified internucleoside linkage or at least one synthetically modified sugar-phosphate backbone. In some implementations, the first modified oligonucleotide and/or the second comprises a 2′-O-methyl modified nucleotide, a nucleotide comprising a 5′-phosphorothioate group, a 2′-deoxy-2′-fluoro modified nucleotide, a 2′-deoxy-modified nucleotide, a locked nucleotide, an abasic nucleotide, deoxythymidine, an inverted deoxythymidine, a 2′-amino-modified nucleotide, a 2′-alkyl-modified nucleotide, a morpholino nucleotide, a phosphoramidate, or a non-natural base comprising nucleotide.

[0344] In some implementations, the first modified oligonucleotide or a subsequence thereof differs by 0, 1, 2, 3, or 4 nucleotides from an equal length portion of any one of SEQ ID NOS: 193-288, wherein the subsequence is at least 14, 15, 16, 17, 18, 19, 20, 21, 22, or 23 bases in length. In some implementations, the first modified oligonucleotide comprises, in order, nucleotides 1-23 of any one of SEQ ID NOS: 193-288. In some implementations, the first modified oligonucleotide comprises a modified nucleotide sequence according to any one of SEQ ID NOS: 193-288. In some implementations, the first modified oligonucleotide comprises a modified nucleotide sequence according to any one of SEQ ID NOS: 200, 203, 206, 208, 227, 228, 230, 231, 233, 234, 244, 269, 276, 278, 279, 280, 281, 282, and 285.

[0345] In some implementations, the second modified oligonucleotide or subsequence thereof differs by 0, 1, 2, 3, or 4 nucleotides from an equal length portion of any one of SEQ ID NOS: 289-384 and 385-480, wherein the subsequence is at least 14, 15, 16, 17, 18, 19, 20, or 21 bases in length. In some implementations, the second modified oligonucleotide comprises, in order, nucleotides 1-21 of any one of SEQ ID NOS: 289-384 and 385-480. In some implementations, the second modified oligonucleotide comprises a modified nucleotide sequence according to any one of SEQ ID NOS: 289-384 and 385-480. In some implementations, the second modified oligonucleotide comprises a modified nucleotide sequence according to any one of SEQ ID NOS: 104, 107, 110, 112, 131, 132, 134, 135, 137, 138, 148, 173, 180, 182, 183, 184, 185, 186, 189, 296, 299, 302, 304, 323, 324, 326, 327, 329, 330, 340, 365, 372, 374, 375, 376, 377, 378, 381, 392, 395, 398, 400, 419, 420, 422, 423, 425 426, 436, 461, 468, 470, 471, 472, 473, 474, and 477.

[0346] In some implementations, (a) the second modified oligonucleotide comprises a modified nucleotide sequence according to SEQ ID NO: 289 and the first modified oligonucleotide comprises a modified nucleotide sequence according to SEQ ID NO: 193;
[0347] (b) the second modified oligonucleotide comprises a modified nucleotide sequence according to SEQ ID NO: 290 and the first modified oligonucleotide comprises a modified nucleotide sequence according to SEQ ID NO: 194;
[0348] (c) the second modified oligonucleotide comprises a modified nucleotide sequence according to SEQ ID NO: 291 and the first modified oligonucleotide comprises a modified nucleotide sequence according to SEQ ID NO: 195;
[0349] (d) the second modified oligonucleotide comprises a modified nucleotide sequence according to SEQ ID NO: 292 and the first modified oligonucleotide comprises a modified nucleotide sequence according to SEQ ID NO: 196;
[0350] (e) the second modified oligonucleotide comprises a modified nucleotide sequence according to SEQ ID NO: 293 and the first modified oligonucleotide comprises a modified nucleotide sequence according to SEQ ID NO: 197;
[0351] (f) the second modified oligonucleotide comprises a modified nucleotide sequence according to SEQ ID NO: 294 and the first modified oligonucleotide comprises a modified nucleotide sequence according to SEQ ID NO: 198;
[0352] (g) the second modified oligonucleotide comprises a modified nucleotide sequence according to SEQ ID NO: 295 and the first modified oligonucleotide comprises a modified nucleotide sequence according to SEQ ID NO: 199;
[0353] (h) the second modified oligonucleotide comprises a modified nucleotide sequence according to SEQ ID NO: 296 and the first modified oligonucleotide comprises a modified nucleotide sequence according to SEQ ID NO: 200;
[0354] (i) the second modified oligonucleotide comprises a modified nucleotide sequence according to SEQ ID NO: 297 and the first modified oligonucleotide comprises a modified nucleotide sequence according to SEQ ID NO: 201;
[0355] (j) the second modified oligonucleotide comprises a modified nucleotide sequence according to SEQ ID NO: 298 and the first modified oligonucleotide comprises a modified nucleotide sequence according to SEQ ID NO: 202;
[0356] (k) the second modified oligonucleotide comprises a modified nucleotide sequence according to SEQ ID NO: 299 and the first modified oligonucleotide comprises a modified nucleotide sequence according to SEQ ID NO: 203;
[0357] (l) the second modified oligonucleotide comprises a modified nucleotide sequence according to SEQ ID NO: 300 and the first modified oligonucleotide comprises a modified nucleotide sequence according to SEQ ID NO: 204;
[0358] (m) the second modified oligonucleotide comprises a modified nucleotide sequence according to SEQ ID NO: 301 and the first modified oligonucleotide comprises a modified nucleotide sequence according to SEQ ID NO: 205;
[0359] (n) the second modified oligonucleotide comprises a modified nucleotide sequence according to SEQ ID NO: 302 and the first modified oligonucleotide comprises a modified nucleotide sequence according to SEQ ID NO: 206;
[0360] (o) the second modified oligonucleotide comprises a modified nucleotide sequence according to SEQ ID NO: 303 and the first modified oligonucleotide comprises a modified nucleotide sequence according to SEQ ID NO: 207;
[0361] (p) the second modified oligonucleotide comprises a modified nucleotide sequence according to SEQ ID NO: 304 and the first modified oligonucleotide comprises a modified nucleotide sequence according to SEQ ID NO: 208;
[0362] (q) the second modified oligonucleotide comprises a modified nucleotide sequence according to SEQ ID NO: 305 and the first modified oligonucleotide comprises a modified nucleotide sequence according to SEQ ID NO: 209;
[0363] (r) the second modified oligonucleotide comprises a modified nucleotide sequence according to SEQ ID NO: 306 and the first modified oligonucleotide comprises a modified nucleotide sequence according to SEQ ID NO: 210;
[0364] (s) the second modified oligonucleotide comprises a modified nucleotide sequence according to SEQ ID NO: 307 and the first modified oligonucleotide comprises a modified nucleotide sequence according to SEQ ID NO: 211;
[0365] (t) the second modified oligonucleotide comprises a modified nucleotide sequence according to SEQ ID NO: 308 and the first modified oligonucleotide comprises a modified nucleotide sequence according to SEQ ID NO: 212;
[0366] (u) the second modified oligonucleotide comprises a modified nucleotide sequence according to SEQ ID NO: 309 and the first modified oligonucleotide comprises a modified nucleotide sequence according to SEQ ID NO: 213;
[0367] (v) the second modified oligonucleotide comprises a modified nucleotide sequence according to SEQ ID NO: 310 and the first modified oligonucleotide comprises a modified nucleotide sequence according to SEQ ID NO: 214;
[0368] (w) the second modified oligonucleotide comprises a modified nucleotide sequence according to SEQ ID NO: 311 and the first modified oligonucleotide comprises a modified nucleotide sequence according to SEQ ID NO: 215;
[0369] (x) the second modified oligonucleotide comprises a modified nucleotide sequence according to SEQ ID NO: 312 and the first modified oligonucleotide comprises a modified nucleotide sequence according to SEQ ID NO: 216;
[0370] (y) the second modified oligonucleotide comprises a modified nucleotide sequence according to SEQ ID NO: 313 and the first modified oligonucleotide comprises a modified nucleotide sequence according to SEQ ID NO: 217;
[0371] (z) the second modified oligonucleotide comprises a modified nucleotide sequence according to SEQ ID NO: 314 and the first modified oligonucleotide comprises a modified nucleotide sequence according to SEQ ID NO: 218;
[0372] (aa) the second modified oligonucleotide comprises a modified nucleotide sequence according to SEQ ID NO: 315 and the first modified oligonucleotide comprises a modified nucleotide sequence according to SEQ ID NO: 219;
[0373] (bb) the second modified oligonucleotide comprises a modified nucleotide sequence according to SEQ ID NO: 316 and the first modified oligonucleotide comprises a modified nucleotide sequence according to SEQ ID NO: 220;
[0374] (cc) the second modified oligonucleotide comprises a modified nucleotide sequence according to SEQ ID NO: 317 and the first modified oligonucleotide comprises a modified nucleotide sequence according to SEQ ID NO: 221;
[0375] (dd) the second modified oligonucleotide comprises a modified nucleotide sequence according to SEQ ID NO: 318 and the first modified oligonucleotide comprises a modified nucleotide sequence according to SEQ ID NO: 222;
[0376] (ee) the second modified oligonucleotide comprises a modified nucleotide sequence according to SEQ ID NO: 319 and the first modified oligonucleotide comprises a modified nucleotide sequence according to SEQ ID NO: 223;
[0377] (ff) the second modified oligonucleotide comprises a modified nucleotide sequence according to SEQ ID NO: 320 and the first modified oligonucleotide comprises a modified nucleotide sequence according to SEQ ID NO: 224;
[0378] (gg) the second modified oligonucleotide comprises a modified nucleotide sequence according to SEQ ID NO: 321 and the first modified oligonucleotide comprises a modified nucleotide sequence according to SEQ ID NO: 225;
[0379] (hh) the second modified oligonucleotide comprises a modified nucleotide sequence according to SEQ ID NO: 322 and the first modified oligonucleotide comprises a modified nucleotide sequence according to SEQ ID NO: 226;
[0380] (ii) the second modified oligonucleotide comprises a modified nucleotide sequence according to SEQ ID NO: 323 and the first modified oligonucleotide comprises a modified nucleotide sequence according to SEQ ID NO: 227;
[0381] (jj) the second modified oligonucleotide comprises a modified nucleotide sequence according to SEQ ID NO: 324 and the first modified oligonucleotide comprises a modified nucleotide sequence according to SEQ ID NO: 228;
[0382] (kk) the second modified oligonucleotide comprises a modified nucleotide sequence according to SEQ ID NO: 325 and the first modified oligonucleotide comprises a modified nucleotide sequence according to SEQ ID NO: 229;
[0383] (ll) the second modified oligonucleotide comprises a modified nucleotide sequence according to SEQ ID NO: 326 and the first modified oligonucleotide comprises a modified nucleotide sequence according to SEQ ID NO: 230;
[0384] (mm) the second modified oligonucleotide comprises a modified nucleotide sequence according to SEQ ID NO: 327 and the first modified oligonucleotide comprises a modified nucleotide sequence according to SEQ ID NO: 231;
[0385] (nn) the second modified oligonucleotide comprises a modified nucleotide sequence according to SEQ ID NO: 328 and the first modified oligonucleotide comprises a modified nucleotide sequence according to SEQ ID NO: 232;
[0386] (oo) the second modified oligonucleotide comprises a modified nucleotide sequence according to SEQ ID NO: 329 and the first modified oligonucleotide comprises a modified nucleotide sequence according to SEQ ID NO: 233;
[0387] (pp) the second modified oligonucleotide comprises a modified nucleotide sequence according to SEQ ID NO: 330 and the first modified oligonucleotide comprises a modified nucleotide sequence according to SEQ ID NO: 234;
[0388] (qq) the second modified oligonucleotide comprises a modified nucleotide sequence according to SEQ ID NO: 331 and the first modified oligonucleotide comprises a modified nucleotide sequence according to SEQ ID NO: 235;
[0389] (rr) the second modified oligonucleotide comprises a modified nucleotide sequence according to SEQ ID NO: 332 and the first modified oligonucleotide comprises a modified nucleotide sequence according to SEQ ID NO: 236;
[0390] (ss) the second modified oligonucleotide comprises a modified nucleotide sequence according to SEQ ID NO: 333 and the first modified oligonucleotide comprises a modified nucleotide sequence according to SEQ ID NO: 237;
[0391] (tt) the second modified oligonucleotide comprises a modified nucleotide sequence according to SEQ ID NO: 334 and the first modified oligonucleotide comprises a modified nucleotide sequence according to SEQ ID NO: 238;
[0392] (uu) the second modified oligonucleotide comprises a modified nucleotide sequence according to SEQ ID NO: 335 and the first modified oligonucleotide comprises a modified nucleotide sequence according to SEQ ID NO: 239;
[0393] (vv) the second modified oligonucleotide comprises a modified nucleotide sequence according to SEQ ID NO: 336 and the first modified oligonucleotide comprises a modified nucleotide sequence according to SEQ ID NO: 240;
[0394] (ww) the second modified oligonucleotide comprises a modified nucleotide sequence according to SEQ ID NO: 337 and the first modified oligonucleotide comprises a modified nucleotide sequence according to SEQ ID NO: 241;
[0395] (xx) the second modified oligonucleotide comprises a modified nucleotide sequence according to SEQ ID NO: 338 and the first modified oligonucleotide comprises a modified nucleotide sequence according to SEQ ID NO: 242;
[0396] (yy) the second modified oligonucleotide comprises a modified nucleotide sequence according to SEQ ID NO: 339 and the first modified oligonucleotide comprises a modified nucleotide sequence according to SEQ ID NO: 243;
[0397] (zz) the second modified oligonucleotide comprises a modified nucleotide sequence according to SEQ ID NO: 340 and the first modified oligonucleotide comprises a modified nucleotide sequence according to SEQ ID NO: 244;
[0398] (aaa) the second modified oligonucleotide comprises a modified nucleotide sequence according to SEQ ID NO: 341 and the first modified oligonucleotide comprises a modified nucleotide sequence according to SEQ ID NO: 245;
[0399] (bbb) the second modified oligonucleotide comprises a modified nucleotide sequence according to SEQ ID NO: 342 and the first modified oligonucleotide comprises a modified nucleotide sequence according to SEQ ID NO: 246;
[0400] (ccc) the second modified oligonucleotide comprises a modified nucleotide sequence according to SEQ ID NO: 343 and the first modified oligonucleotide comprises a modified nucleotide sequence according to SEQ ID NO: 247;
[0401] (ddd) the second modified oligonucleotide comprises a modified nucleotide sequence according to SEQ ID NO: 344 and the first modified oligonucleotide comprises a modified nucleotide sequence according to SEQ ID NO: 248;
[0402] (eee) the second modified oligonucleotide comprises a modified nucleotide sequence according to SEQ ID NO: 345 and the first modified oligonucleotide comprises a modified nucleotide sequence according to SEQ ID NO: 249;
[0403] (fff) the second modified oligonucleotide comprises a modified nucleotide sequence according to SEQ ID NO: 346 and the first modified oligonucleotide comprises a modified nucleotide sequence according to SEQ ID NO: 250;
[0404] (ggg) the second modified oligonucleotide comprises a modified nucleotide sequence according to SEQ ID NO: 347 and the first modified oligonucleotide comprises a modified nucleotide sequence according to SEQ ID NO: 251;
[0405] (hhh) the second modified oligonucleotide comprises a modified nucleotide sequence according to SEQ ID NO: 348 and the first modified oligonucleotide comprises a modified nucleotide sequence according to SEQ ID NO: 252;
[0406] (iii) the second modified oligonucleotide comprises a modified nucleotide sequence according to SEQ ID NO: 349 and the first modified oligonucleotide comprises a modified nucleotide sequence according to SEQ ID NO: 253;
[0407] (jjj) the second modified oligonucleotide comprises a modified nucleotide sequence according to SEQ ID NO: 350 and the first modified oligonucleotide comprises a modified nucleotide sequence according to SEQ ID NO: 254;
[0408] (kkk) the second modified oligonucleotide comprises a modified nucleotide sequence according to SEQ ID NO: 351 and the first modified oligonucleotide comprises a modified nucleotide sequence according to SEQ ID NO: 255;
[0409] (lll) the second modified oligonucleotide comprises a modified nucleotide sequence according to SEQ ID NO: 352 and the first modified oligonucleotide comprises a modified nucleotide sequence according to SEQ ID NO: 256;
[0410] (mmm) the second modified oligonucleotide comprises a modified nucleotide sequence according to SEQ ID NO: 353 and the first modified oligonucleotide comprises a modified nucleotide sequence according to SEQ ID NO: 257;
[0411] (nnn) the second modified oligonucleotide comprises a modified nucleotide sequence according to SEQ ID NO: 354 and the first modified oligonucleotide comprises a modified nucleotide sequence according to SEQ ID NO: 258;
[0412] (ooo) the second modified oligonucleotide comprises a modified nucleotide sequence according to SEQ ID NO: 355 and the first modified oligonucleotide comprises a modified nucleotide sequence according to SEQ ID NO: 259;
[0413] (ppp) the second modified oligonucleotide comprises a modified nucleotide sequence according to SEQ ID NO: 356 and the first modified oligonucleotide comprises a modified nucleotide sequence according to SEQ ID NO: 260;
[0414] (qqq) the second modified oligonucleotide comprises a modified nucleotide sequence according to SEQ ID NO: 357 and the first modified oligonucleotide comprises a modified nucleotide sequence according to SEQ ID NO: 261;
[0415] (rrr) the second modified oligonucleotide comprises a modified nucleotide sequence according to SEQ ID NO: 358 and the first modified oligonucleotide comprises a modified nucleotide sequence according to SEQ ID NO: 262;
[0416] (sss) the second modified oligonucleotide comprises a modified nucleotide sequence according to SEQ ID NO: 359 and the first modified oligonucleotide comprises a modified nucleotide sequence according to SEQ ID NO: 263;
[0417] (ttt) the second modified oligonucleotide comprises a modified nucleotide sequence according to SEQ ID NO: 360 and the first modified oligonucleotide comprises a modified nucleotide sequence according to SEQ ID NO: 264;
[0418] (uuu) the second modified oligonucleotide comprises a modified nucleotide sequence according to SEQ ID NO: 361 and the first modified oligonucleotide comprises a modified nucleotide sequence according to SEQ ID NO: 265;
[0419] (vvv) the second modified oligonucleotide comprises a modified nucleotide sequence according to SEQ ID NO: 362 and the first modified oligonucleotide comprises a modified nucleotide sequence according to SEQ ID NO: 266;
[0420] (www) the second modified oligonucleotide comprises a modified nucleotide sequence according to SEQ ID NO: 363 and the first modified oligonucleotide comprises a modified nucleotide sequence according to SEQ ID NO: 267;
[0421] (xxx) the second modified oligonucleotide comprises a modified nucleotide sequence according to SEQ ID NO: 364 and the first modified oligonucleotide comprises a modified nucleotide sequence according to SEQ ID NO: 268;
[0422] (yyy) the second modified oligonucleotide comprises a modified nucleotide sequence according to SEQ ID NO: 365 and the first modified oligonucleotide comprises a modified nucleotide sequence according to SEQ ID NO: 269;
[0423] (zzz) the second modified oligonucleotide comprises a modified nucleotide sequence according to SEQ ID NO: 366 and the first modified oligonucleotide comprises a modified nucleotide sequence according to SEQ ID NO: 270;
[0424] (aaaa) the second modified oligonucleotide comprises a modified nucleotide sequence according to SEQ ID NO: 367 and the first modified oligonucleotide comprises a modified nucleotide sequence according to SEQ ID NO: 271;
[0425] (bbbb) the second modified oligonucleotide comprises a modified nucleotide sequence according to SEQ ID NO: 368 and the first modified oligonucleotide comprises a modified nucleotide sequence according to SEQ ID NO: 272;
[0426] (cccc) the second modified oligonucleotide comprises a modified nucleotide sequence according to SEQ ID NO: 369 and the first modified oligonucleotide comprises a modified nucleotide sequence according to SEQ ID NO: 273;
[0427] (dddd) the second modified oligonucleotide comprises a modified nucleotide sequence according to SEQ ID NO: 370 and the first modified oligonucleotide comprises a modified nucleotide sequence according to SEQ ID NO: 274;
[0428] (eeee) the second modified oligonucleotide comprises a modified nucleotide sequence according to SEQ ID NO: 371 and the first modified oligonucleotide comprises a modified nucleotide sequence according to SEQ ID NO: 275;
[0429] (ffff) the second modified oligonucleotide comprises a modified nucleotide sequence according to SEQ ID NO: 372 and the first modified oligonucleotide comprises a modified nucleotide sequence according to SEQ ID NO: 276;
[0430] (gggg) the second modified oligonucleotide comprises a modified nucleotide sequence according to SEQ ID NO: 373 and the first modified oligonucleotide comprises a modified nucleotide sequence according to SEQ ID NO: 277;
[0431] (hhhh) the second modified oligonucleotide comprises a modified nucleotide sequence according to SEQ ID NO: 374 and the first modified oligonucleotide comprises a modified nucleotide sequence according to SEQ ID NO: 278;
[0432] (iiii) the second modified oligonucleotide comprises a modified nucleotide sequence according to SEQ ID NO: 375 and the first modified oligonucleotide comprises a modified nucleotide sequence according to SEQ ID NO: 279;
[0433] (jjjj) the second modified oligonucleotide comprises a modified nucleotide sequence according to SEQ ID NO: 376 and the first modified oligonucleotide comprises a modified nucleotide sequence according to SEQ ID NO: 280;
[0434] (kkkk) the second modified oligonucleotide comprises a modified nucleotide sequence according to SEQ ID NO: 377 and the first modified oligonucleotide comprises a modified nucleotide sequence according to SEQ ID NO: 281;
[0435] (llll) the second modified oligonucleotide comprises a modified nucleotide sequence according to SEQ ID NO: 378 and the first modified oligonucleotide comprises a modified nucleotide sequence according to SEQ ID NO: 282;
[0436] (mmmm) the second modified oligonucleotide comprises a modified nucleotide sequence according to SEQ ID NO: 379 and the first modified oligonucleotide comprises a modified nucleotide sequence according to SEQ ID NO: 283;
[0437] (nnnn) the second modified oligonucleotide comprises a modified nucleotide sequence according to SEQ ID NO: 380 and the first modified oligonucleotide comprises a modified nucleotide sequence according to SEQ ID NO: 284;
[0438] (oooo) the second modified oligonucleotide comprises a modified nucleotide sequence according to SEQ ID NO: 381 and the first modified oligonucleotide comprises a modified nucleotide sequence according to SEQ ID NO: 285;
[0439] (pppp) the second modified oligonucleotide comprises a modified nucleotide sequence according to SEQ ID NO: 382 and the first modified oligonucleotide comprises a modified nucleotide sequence according to SEQ ID NO: 286;
[0440] (qqqq) the second modified oligonucleotide comprises a modified nucleotide sequence according to SEQ ID NO: 383 and the first modified oligonucleotide comprises a modified nucleotide sequence according to SEQ ID NO: 287;
[0441] (rrrr) the second modified oligonucleotide comprises a modified nucleotide sequence according to SEQ ID NO: 384 and the first modified oligonucleotide comprises a modified nucleotide sequence according to SEQ ID NO: 288
[0442] (ssss) the sense strand comprises a modified nucleotide sequence according to SEQ ID NO: 385 and the antisense strand comprises a modified nucleotide sequence according to SEQ ID NO: 193;
[0443] (tttt) the sense strand comprises a modified nucleotide sequence according to SEQ ID NO: 386 and the antisense strand comprises a modified nucleotide sequence according to SEQ ID NO: 194;
[0444] (uuuu) the sense strand comprises a modified nucleotide sequence according to SEQ ID NO: 387 and the antisense strand comprises a modified nucleotide sequence according to SEQ ID NO: 195;
[0445] (vvvv) the sense strand comprises a modified nucleotide sequence according to SEQ ID NO: 388 and the antisense strand comprises a modified nucleotide sequence according to SEQ ID NO: 196;
[0446] (wwww) the sense strand comprises a modified nucleotide sequence according to SEQ ID NO: 389 and the antisense strand comprises a modified nucleotide sequence according to SEQ ID NO: 197;
[0447] (xxxx) the sense strand comprises a modified nucleotide sequence according to SEQ ID NO: 390 and the antisense strand comprises a modified nucleotide sequence according to SEQ ID NO: 198;
[0448] (yyyy) the sense strand comprises a modified nucleotide sequence according to SEQ ID NO: 391 and the antisense strand comprises a modified nucleotide sequence according to SEQ ID NO: 199;
[0449] (zzzz) the sense strand comprises a modified nucleotide sequence according to SEQ ID NO: 392 and the antisense strand comprises a modified nucleotide sequence according to SEQ ID NO: 200;
[0450] (aaaaa) the sense strand comprises a modified nucleotide sequence according to SEQ ID NO: 393 and the antisense strand comprises a modified nucleotide sequence according to SEQ ID NO: 201;
[0451] (bbbbb) the sense strand comprises a modified nucleotide sequence according to SEQ ID NO: 394 and the antisense strand comprises a modified nucleotide sequence according to SEQ ID NO: 202;
[0452] (ccccc) the sense strand comprises a modified nucleotide sequence according to SEQ ID NO: 395 and the antisense strand comprises a modified nucleotide sequence according to SEQ ID NO: 203;
[0453] (ddddd) the sense strand comprises a modified nucleotide sequence according to SEQ ID NO: 396 and the antisense strand comprises a modified nucleotide sequence according to SEQ ID NO: 204;
[0454] (eeeee) the sense strand comprises a modified nucleotide sequence according to SEQ ID NO: 397 and the antisense strand comprises a modified nucleotide sequence according to SEQ ID NO: 205;
[0455] (fffff) the sense strand comprises a modified nucleotide sequence according to SEQ ID NO: 398 and the antisense strand comprises a modified nucleotide sequence according to SEQ ID NO: 206;
[0456] (ggggg) the sense strand comprises a modified nucleotide sequence according to SEQ ID NO: 399 and the antisense strand comprises a modified nucleotide sequence according to SEQ ID NO: 207;
[0457] (hhhhh) the sense strand comprises a modified nucleotide sequence according to SEQ ID NO: 400 and the antisense strand comprises a modified nucleotide sequence according to SEQ ID NO: 208;
[0458] (iiiii) the sense strand comprises a modified nucleotide sequence according to SEQ ID NO: 401 and the antisense strand comprises a modified nucleotide sequence according to SEQ ID NO: 209;
[0459] (jjjjj) the sense strand comprises a modified nucleotide sequence according to SEQ ID NO: 402 and the antisense strand comprises a modified nucleotide sequence according to SEQ ID NO: 210;
[0460] (kkkkk) the sense strand comprises a modified nucleotide sequence according to SEQ ID NO: 403 and the antisense strand comprises a modified nucleotide sequence according to SEQ ID NO: 211;
[0461] (lllll) the sense strand comprises a modified nucleotide sequence according to SEQ ID NO: 404 and the antisense strand comprises a modified nucleotide sequence according to SEQ ID NO: 212;
[0462] (mmmmm) the sense strand comprises a modified nucleotide sequence according to SEQ ID NO: 405 and the antisense strand comprises a modified nucleotide sequence according to SEQ ID NO: 213;
[0463] (nnnnn) the sense strand comprises a modified nucleotide sequence according to SEQ ID NO: 406 and the antisense strand comprises a modified nucleotide sequence according to SEQ ID NO: 214;
[0464] (ooooo) the sense strand comprises a modified nucleotide sequence according to SEQ ID NO: 407 and the antisense strand comprises a modified nucleotide sequence according to SEQ ID NO: 215;
[0465] (ppppp) the sense strand comprises a modified nucleotide sequence according to SEQ ID NO: 408 and the antisense strand comprises a modified nucleotide sequence according to SEQ ID NO: 216;
[0466] (qqqqq) the sense strand comprises a modified nucleotide sequence according to SEQ ID NO: 409 and the antisense strand comprises a modified nucleotide sequence according to SEQ ID NO: 217;
[0467] (rrrrr) the sense strand comprises a modified nucleotide sequence according to SEQ ID NO: 410 and the antisense strand comprises a modified nucleotide sequence according to SEQ ID NO: 218;
[0468] (sssss) the sense strand comprises a modified nucleotide sequence according to SEQ ID NO: 411 and the antisense strand comprises a modified nucleotide sequence according to SEQ ID NO: 219;
[0469] (ttttt) the sense strand comprises a modified nucleotide sequence according to SEQ ID NO: 412 and the antisense strand comprises a modified nucleotide sequence according to SEQ ID NO: 220;
[0470] (uuuuu) the sense strand comprises a modified nucleotide sequence according to SEQ ID NO: 413 and the antisense strand comprises a modified nucleotide sequence according to SEQ ID NO: 221;
[0471] (vvvvv) the sense strand comprises a modified nucleotide sequence according to SEQ ID NO: 414 and the antisense strand comprises a modified nucleotide sequence according to SEQ ID NO: 222;
[0472] (wwwww) the sense strand comprises a modified nucleotide sequence according to SEQ ID NO: 415 and the antisense strand comprises a modified nucleotide sequence according to SEQ ID NO: 223;
[0473] (xxxxx) the sense strand comprises a modified nucleotide sequence according to SEQ ID NO: 416 and the antisense strand comprises a modified nucleotide sequence according to SEQ ID NO: 224;
[0474] (yyyyy) the sense strand comprises a modified nucleotide sequence according to SEQ ID NO: 417 and the antisense strand comprises a modified nucleotide sequence according to SEQ ID NO: 225;
[0475] (zzzzz) the sense strand comprises a modified nucleotide sequence according to SEQ ID NO: 418 and the antisense strand comprises a modified nucleotide sequence according to SEQ ID NO: 226;
[0476] (aaaaaa) the sense strand comprises a modified nucleotide sequence according to SEQ ID NO: 419 and the antisense strand comprises a modified nucleotide sequence according to SEQ ID NO: 227;
[0477] (bbbbbb) the sense strand comprises a modified nucleotide sequence according to SEQ ID NO: 420 and the antisense strand comprises a modified nucleotide sequence according to SEQ ID NO: 228;
[0478] (cccccc) the sense strand comprises a modified nucleotide sequence according to SEQ ID NO: 421 and the antisense strand comprises a modified nucleotide sequence according to SEQ ID NO: 229;
[0479] (dddddd) the sense strand comprises a modified nucleotide sequence according to SEQ ID NO: 422 and the antisense strand comprises a modified nucleotide sequence according to SEQ ID NO: 230;
[0480] (eeeeee) the sense strand comprises a modified nucleotide sequence according to SEQ ID NO: 423 and the antisense strand comprises a modified nucleotide sequence according to SEQ ID NO: 231;
[0481] (ffffff) the sense strand comprises a modified nucleotide sequence according to SEQ ID NO: 424 and the antisense strand comprises a modified nucleotide sequence according to SEQ ID NO: 232;
[0482] (gggggg) the sense strand comprises a modified nucleotide sequence according to SEQ ID NO: 425 and the antisense strand comprises a modified nucleotide sequence according to SEQ ID NO: 233;
[0483] (hhhhhh) the sense strand comprises a modified nucleotide sequence according to SEQ ID NO: 426 and the antisense strand comprises a modified nucleotide sequence according to SEQ ID NO: 234;
[0484] (iiiiii) the sense strand comprises a modified nucleotide sequence according to SEQ ID NO: 427 and the antisense strand comprises a modified nucleotide sequence according to SEQ ID NO: 235;
[0485] (jjjjjj) the sense strand comprises a modified nucleotide sequence according to SEQ ID NO: 428 and the antisense strand comprises a modified nucleotide sequence according to SEQ ID NO: 236;
[0486] (kkkkkk) the sense strand comprises a modified nucleotide sequence according to SEQ ID NO: 429 and the antisense strand comprises a modified nucleotide sequence according to SEQ ID NO: 237;
[0487] (llllll) the sense strand comprises a modified nucleotide sequence according to SEQ ID NO: 430 and the antisense strand comprises a modified nucleotide sequence according to SEQ ID NO: 238;
[0488] (mmmmmm) the sense strand comprises a modified nucleotide sequence according to SEQ ID NO: 431 and the antisense strand comprises a modified nucleotide sequence according to SEQ ID NO: 239;
[0489] (nnnnnn) the sense strand comprises a modified nucleotide sequence according to SEQ ID NO: 432 and the antisense strand comprises a modified nucleotide sequence according to SEQ ID NO: 240;
[0490] (oooooo) the sense strand comprises a modified nucleotide sequence according to SEQ ID NO: 433 and the antisense strand comprises a modified nucleotide sequence according to SEQ ID NO: 241;
[0491] (pppppp) the sense strand comprises a modified nucleotide sequence according to SEQ ID NO: 434 and the antisense strand comprises a modified nucleotide sequence according to SEQ ID NO: 242;
[0492] (qqqqqq) the sense strand comprises a modified nucleotide sequence according to SEQ ID NO: 435 and the antisense strand comprises a modified nucleotide sequence according to SEQ ID NO: 243;
[0493] (rrrrrr) the sense strand comprises a modified nucleotide sequence according to SEQ ID NO: 436 and the antisense strand comprises a modified nucleotide sequence according to SEQ ID NO: 244;
[0494] (ssssss) the sense strand comprises a modified nucleotide sequence according to SEQ ID NO: 437 and the antisense strand comprises a modified nucleotide sequence according to SEQ ID NO: 245;
[0495] (tttttt) the sense strand comprises a modified nucleotide sequence according to SEQ ID NO: 438 and the antisense strand comprises a modified nucleotide sequence according to SEQ ID NO: 246;
[0496] (uuuuuu) the sense strand comprises a modified nucleotide sequence according to SEQ ID NO: 439 and the antisense strand comprises a modified nucleotide sequence according to SEQ ID NO: 247;
[0497] (vvvvvv) the sense strand comprises a modified nucleotide sequence according to SEQ ID NO: 440 and the antisense strand comprises a modified nucleotide sequence according to SEQ ID NO: 248;
[0498] (wwwwww) the sense strand comprises a modified nucleotide sequence according to SEQ ID NO: 441 and the antisense strand comprises a modified nucleotide sequence according to SEQ ID NO: 249;
[0499] (xxxxxx) the sense strand comprises a modified nucleotide sequence according to SEQ ID NO: 442 and the antisense strand comprises a modified nucleotide sequence according to SEQ ID NO: 250;
[0500] (yyyyyy) the sense strand comprises a modified nucleotide sequence according to SEQ ID NO: 443 and the antisense strand comprises a modified nucleotide sequence according to SEQ ID NO: 251;
[0501] (zzzzzz) the sense strand comprises a modified nucleotide sequence according to SEQ ID NO: 444 and the antisense strand comprises a modified nucleotide sequence according to SEQ ID NO: 252;
[0502] (aaaaaaa) the sense strand comprises a modified nucleotide sequence according to SEQ ID NO: 445 and the antisense strand comprises a modified nucleotide sequence according to SEQ ID NO: 253;
[0503] (bbbbbbb) the sense strand comprises a modified nucleotide sequence according to SEQ ID NO: 446 and the antisense strand comprises a modified nucleotide sequence according to SEQ ID NO: 254;
[0504] (ccccccc) the sense strand comprises a modified nucleotide sequence according to SEQ ID NO: 447 and the antisense strand comprises a modified nucleotide sequence according to SEQ ID NO: 255;
[0505] (ddddddd) the sense strand comprises a modified nucleotide sequence according to SEQ ID NO: 448 and the antisense strand comprises a modified nucleotide sequence according to SEQ ID NO: 256;
[0506] (eeeeeee) the sense strand comprises a modified nucleotide sequence according to SEQ ID NO: 449 and the antisense strand comprises a modified nucleotide sequence according to SEQ ID NO: 257;
[0507] (fffffff) the sense strand comprises a modified nucleotide sequence according to SEQ ID NO: 450 and the antisense strand comprises a modified nucleotide sequence according to SEQ ID NO: 258;
[0508] (ggggggg) the sense strand comprises a modified nucleotide sequence according to SEQ ID NO: 451 and the antisense strand comprises a modified nucleotide sequence according to SEQ ID NO: 259;
[0509] (hhhhhhh) the sense strand comprises a modified nucleotide sequence according to SEQ ID NO: 452 and the antisense strand comprises a modified nucleotide sequence according to SEQ ID NO: 260;
[0510] (iiiiii) the sense strand comprises a modified nucleotide sequence according to SEQ ID NO: 453 and the antisense strand comprises a modified nucleotide sequence according to SEQ ID NO: 261;
[0511] (jjjjjjj) the sense strand comprises a modified nucleotide sequence according to SEQ ID NO: 454 and the antisense strand comprises a modified nucleotide sequence according to SEQ ID NO: 262;
[0512] (kkkkkkk) the sense strand comprises a modified nucleotide sequence according to SEQ ID NO: 455 and the antisense strand comprises a modified nucleotide sequence according to SEQ ID NO: 263;
[0513] (lllllll) the sense strand comprises a modified nucleotide sequence according to SEQ ID NO: 456 and the antisense strand comprises a modified nucleotide sequence according to SEQ ID NO: 264;
[0514] (mmmmmmm) the sense strand comprises a modified nucleotide sequence according to SEQ ID NO: 457 and the antisense strand comprises a modified nucleotide sequence according to SEQ ID NO: 265;
[0515] (nnnnnnn) the sense strand comprises a modified nucleotide sequence according to SEQ ID NO: 458 and the antisense strand comprises a modified nucleotide sequence according to SEQ ID NO: 266;
[0516] (ooooooo) the sense strand comprises a modified nucleotide sequence according to SEQ ID NO: 459 and the antisense strand comprises a modified nucleotide sequence according to SEQ ID NO: 267;
[0517] (ppppppp) the sense strand comprises a modified nucleotide sequence according to SEQ ID NO: 460 and the antisense strand comprises a modified nucleotide sequence according to SEQ ID NO: 268;
[0518] (qqqqqqq) the sense strand comprises a modified nucleotide sequence according to SEQ ID NO: 461 and the antisense strand comprises a modified nucleotide sequence according to SEQ ID NO: 269;
[0519] (rrrrrrrr) the sense strand comprises a modified nucleotide sequence according to SEQ ID NO: 462 and the antisense strand comprises a modified nucleotide sequence according to SEQ ID NO: 270;
[0520] (sssssss) the sense strand comprises a modified nucleotide sequence according to SEQ ID NO: 463 and the antisense strand comprises a modified nucleotide sequence according to SEQ ID NO: 271;
[0521] (ttttttt) the sense strand comprises a modified nucleotide sequence according to SEQ ID NO: 464 and the antisense strand comprises a modified nucleotide sequence according to SEQ ID NO: 272;
[0522] (uuuuuuu) the sense strand comprises a modified nucleotide sequence according to SEQ ID NO: 465 and the antisense strand comprises a modified nucleotide sequence according to SEQ ID NO: 273;
[0523] (vvvvvvv) the sense strand comprises a modified nucleotide sequence according to SEQ ID NO: 466 and the antisense strand comprises a modified nucleotide sequence according to SEQ ID NO: 274;
[0524] (wwwwwww) the sense strand comprises a modified nucleotide sequence according to SEQ ID NO: 467 and the antisense strand comprises a modified nucleotide sequence according to SEQ ID NO: 275;
[0525] (xxxxxxx) the sense strand comprises a modified nucleotide sequence according to SEQ ID NO: 468 and the antisense strand comprises a modified nucleotide sequence according to SEQ ID NO: 276;
[0526] (yyyyyyy) the sense strand comprises a modified nucleotide sequence according to SEQ ID NO: 469 and the antisense strand comprises a modified nucleotide sequence according to SEQ ID NO: 277;
[0527] (zzzzzzz) the sense strand comprises a modified nucleotide sequence according to SEQ ID NO: 470 and the antisense strand comprises a modified nucleotide sequence according to SEQ ID NO: 278;
[0528] (aaaaaaaa) the sense strand comprises a modified nucleotide sequence according to SEQ ID NO: 471 and the antisense strand comprises a modified nucleotide sequence according to SEQ ID NO: 279;
[0529] (bbbbbbbb) the sense strand comprises a modified nucleotide sequence according to SEQ ID NO: 472 and the antisense strand comprises a modified nucleotide sequence according to SEQ ID NO: 280;
[0530] (cccccccc) the sense strand comprises a modified nucleotide sequence according to SEQ ID NO: 473 and the antisense strand comprises a modified nucleotide sequence according to SEQ ID NO: 281;
[0531] (dddddddd) the sense strand comprises a modified nucleotide sequence according to SEQ ID NO: 474 and the antisense strand comprises a modified nucleotide sequence according to SEQ ID NO: 282;
[0532] (eeeeeeee) the sense strand comprises a modified nucleotide sequence according to SEQ ID NO: 475 and the antisense strand comprises a modified nucleotide sequence according to SEQ ID NO: 283;
[0533] (ffffffff) the sense strand comprises a modified nucleotide sequence according to SEQ ID NO: 476 and the antisense strand comprises a modified nucleotide sequence according to SEQ ID NO: 284;
[0534] (gggggggg) the sense strand comprises a modified nucleotide sequence according to SEQ ID NO: 477 and the antisense strand comprises a modified nucleotide sequence according to SEQ ID NO: 285;
[0535] (hhhhhhhh) the sense strand comprises a modified nucleotide sequence according to SEQ ID NO: 478 and the antisense strand comprises a modified nucleotide sequence according to SEQ ID NO: 286;
[0536] (iiiiiii) the sense strand comprises a modified nucleotide sequence according to SEQ ID NO: 479 and the antisense strand comprises a modified nucleotide sequence according to SEQ ID NO: 287; or
[0537] (jjjjjjjj) the sense strand comprises a modified nucleotide sequence according to SEQ ID NO: 480 and the antisense strand comprises a modified nucleotide sequence according to SEQ ID NO: 288.

[0538] In some implementations, the first modified oligonucleotide and/or second modified oligonucleotide comprises a targeting ligand. In some implementations, the first modified oligonucleotide comprises a targeting ligand conjugated to its 3′ end. In some implementations, the first modified oligonucleotide comprises a targeting ligand conjugated to its 5′ end. In some implementations, the second modified oligonucleotide comprises a targeting ligand conjugated to its 3′ end. In some implementations, the second modified oligonucleotide comprises a targeting ligand conjugated to its 5′ end.

[0539] In some implementations, the targeting ligand targets a hepatocyte, and optionally wherein the targeting ligand comprises a galactose trimer. In some implementations, the targeting ligand comprises N-acetylgalactosamine (GalNAc). In some implementations, the targeting ligand comprises a structure according to Formula I:

[chemical structure]

wherein R is:
[0540] (i) the first modified oligonucleotide or the second modified oligonucleotide; or
[0541] (ii) a linker conjugated to the first modified oligonucleotide or the second modified oligonucleotide.

[0542] In some implementations, R is a linker conjugated to the first modified oligonucleotide or the second modified oligonucleotide having a structure according to Formula III:

[chemical structure]

wherein:
[0543] (i) connection point C of Formula III is conjugated to Formula I, and connection point D of Formula III is conjugated to the first modified oligonucleotide or the second modified oligonucleotide; or
[0544] (ii) connection point C of Formula III is conjugated to Formula I, and connection point D of Formula III is conjugated to a phosphate group which is conjugated to the first modified oligonucleotide or the second modified oligonucleotide.

[0545] In some implementations, Formula III or the phosphate group is conjugated to the 3′ end or the 5′ end of the first modified oligonucleotide or the second modified oligonucleotide. In some implementations, Formula III or the phosphate group is conjugated to an internal nucleotide or nucleoside base of the first modified oligonucleotide or the second modified oligonucleotide. In some implementations, the first modified oligonucleotide or the second modified oligonucleotide comprises a targeting ligand and linker according to Formula V:

[chemical structure]

[0546] In some implementations, the oligomeric duplex is an siRNA molecule. In some implementations, the oligomeric duplex is an shRNA molecule.

[0547] Described herein is a pharmaceutical composition comprising the RNAi agent described herein, the modified oligonucleotide described herein, or the oligomeric duplex of described herein, and a pharmaceutically acceptable carrier.

[0548] Described herein is a lipid nanoparticle comprising the RNAi agent described herein, the modified oligonucleotide described herein, the oligomeric duplex described herein, or the pharmaceutical composition described herein.

[0549] Described herein is a method of making a pharmaceutical composition, comprising combining the RNAi agent described herein, the modified oligonucleotide described herein, or the oligomeric duplex described herein, with a delivery vehicle selected from the group consisting of a phosphate-buffered saline (PBS), lipid, a nanoparticle, a polymer, a liposome, a micelle, a dynamic polyconjugate (DPC), and antibody-oligo conjugate.

[0550] Described herein is a method of treating metabolic dysfunction-associated steatotic liver disease (MASLD) or metabolic dysfunction-associated steatotic liver (MASL) in a subject, comprising: administering to the subject an effective amount of a liver-targeted modified oligonucleotide, a liver-targeted oligomeric duplex, or a liver-targeted RNAi agent that inhibits expression of glucokinase (GCK).

[0551] Described herein is a use of a liver-targeted modified oligonucleotide, a liver-targeted oligomeric duplex, or a liver-targeted RNAi agent that inhibits expression of glucokinase (GCK) for the manufacture of a medicament for the treatment of metabolic dysfunction-associated steatotic liver disease (MASLD) or metabolic dysfunction-associated steatotic liver (MASL) in a subject.

[0552] Described herein is a method of inhibiting expression of glucokinase (GCK) in a subject, comprising: administering to the subject an effective amount of a liver-targeted modified oligonucleotide, a liver-targeted oligomeric duplex, or a liver-targeted RNAi agent that inhibits expression of GCK.

[0553] Described herein is a use of a liver-targeted modified oligonucleotide, a liver-targeted oligomeric duplex, or a liver-targeted RNAi agent in the manufacture of a medicament for inhibiting expression of glucokinase (GCK) in a hepatocyte of a subject.

[0554] Described herein is a method of controlling or reducing liver fat accumulation in a subject, comprising: administering to the subject an effective amount of a liver-targeted modified oligonucleotide, a liver-targeted oligomeric duplex, or a liver-targeted RNAi agent that inhibits expression of glucokinase (GCK).

[0555] Described herein is a use of a liver-targeted modified oligonucleotide, a liver-targeted oligomeric duplex, or a liver-targeted RNAi agent that inhibits expression of glucokinase (GCK) in the manufacture of a medicament for controlling or reducing liver fat accumulation in a subject.

[0556] In some implementations, the method treats metabolic dysfunction-associated steatotic liver disease (MASLD) or metabolic dysfunction-associated steatohepatitis (MASH) in the subject. In some implementations, the method treats nonalcoholic fatty liver disease (NAFLD) or nonalcoholic steatohepatitis (NASH) in the subject. In some implementations, the liver-targeted modified oligonucleotide is the modified oligonucleotide described herein. In some implementations, the liver-targeted oligomeric duplex is the oligomeric duplex described herein.

[0557] In some implementations, the RNAi agent comprises an antisense strand and a sense strand that at least partially complements the antisense strand, wherein: (a) the antisense strand comprises at least 14 contiguous bases from any one of SEQ ID NOS: 1-96; and/or (b) the sense strand comprises at least 14 contiguous bases from any one of SEQ ID NOS: 97-192. In some implementations, one or more bases of the antisense stand and/or the sense strand are modified.

[0558] In some implementations, (a) the antisense strand comprises at least 14 contiguous bases from any one of SEQ ID NOS: 193-288; and/or (b) the sense strand comprises at least 14 contiguous bases from any one of SEQ ID NOS: 289-384 and 385-480. In some implementations, the RNAi agent comprises an antisense strand and a sense strand that at least partially complements the antisense strand, and a targeting ligand conjugated to the antisense strand or the sense strand, wherein the targeting ligand targets a hepatocyte.

[0559] In some implementations, the antisense strand comprises at least 14 contiguous bases that complement a sequence in an mRNA molecule that encodes GCK (SEQ ID NO: 481). In some implementations, the antisense strand and the sense strand form a duplex of at least 14 bases in length. In some implementations, the antisense strand and the sense strand form a duplex of between 15 and 30 bases in length. In some implementations, the antisense strand or a subsequence thereof differs by 0, 1, 2, 3, or 4 nucleotides from an equal length portion of any one of SEQ ID NOS: 1-96 and 193-288, wherein the subsequence is at least 14, 15, 16, 17, 18, 19, 20, 21, 22, or 23 bases in length. In some implementations, the antisense strand comprises, in order, nucleotides 1-23 of any one of SEQ ID NOS: 1-96 and 193-288.

[0560] In some implementations, the antisense strand comprises at least 14 contiguous bases from any one of SEQ ID NOS: 1-96 and 193-288. In some implementations, the antisense strand comprises, in order, nucleobases 1-14 of any one of SEQ ID NOS: 1-96 and 193-288. In some implementations, the antisense strand comprises at least 14 contiguous bases from any one of SEQ ID NOS: 8, 11, 14, 16, 35, 36, 38, 39, 41, 42, 52, 77, 84, 86, 87, 88, 89, 90, 93, 200, 203, 206, 208, 227, 228, 230, 231, 233, 234, 244, 269, 276, 278, 279, 280, 281, 282, and 285. In some implementations, the sense strand or a subsequence thereof differs by 0, 1, 2, 3, or 4 nucleotides from an equal length portion of any one of SEQ ID NOS: 97-192, 289-384, and 385-480, wherein the subsequence is at least 14, 15, 16, 17, 18, 19, 20, or 21 bases in length. In some implementations, the sense strand comprises, in order, nucleotides 1-21 of any one of SEQ ID NOS: 97-192, 289-384, and 385-480.

[0561] In some implementations, the sense strand comprises at least 14 contiguous bases from any one of SEQ ID NOS: 97-192, 289-384, and 385-480. In some implementations, the sense strand comprises, in order, nucleobases 1-14 of any one of SEQ ID NOS: 97-192, 289-384, and 385-480. In some implementations, the sense strand comprises at least 14 contiguous bases from any one of SEQ ID NOS: 104, 107, 110, 112, 131, 132, 134, 135, 137, 138, 148, 173, 180, 182, 183, 184, 185, 186, 189, 296, 299, 302, 304, 323, 324, 326, 327, 329, 330, 340, 365, 372, 374, 375, 376, 377, 378, 381, 392, 395, 398, 400, 419, 420, 422, 423, 425 426, 436, 461, 468, 470, 471, 472, 473, 474, and 477.

[0562] In some implementations, the antisense strand comprises at least 16 contiguous bases that complement a sequence in an mRNA molecule that encodes GCK (SEQ ID NO: 481). In some implementations, the antisense strand and the sense strand form a duplex of at least 16 bases in length. In some implementations, the antisense strand comprises at least 16 contiguous bases from any one of SEQ ID NOS: 1-96 and 193-288. In some implementations, the antisense strand comprises at least 16 contiguous bases from any one of SEQ ID NOS: 8, 11, 14, 16, 35, 36, 38, 39, 41, 42, 52, 77, 84, 86, 87, 88, 89, 90, 93, 200, 203, 206, 208, 227, 228, 230, 231, 233, 234, 244, 269, 276, 278, 279, 280, 281, 282, and 285.

[0563] In some implementations, the antisense strand comprises, in order, nucleobases 1-16, 1-17, 1-18, 1-19, 1-20, 1-21, 1-22, 1-23, 2-17, 2-18, 2-19, 2-20, 2-21, 2-22, 2-23, 3-18, 3-19, 3-20, 3-21, 3-22, 3-23, 4-19, 4-20, 4-21, 4-22, 4-23, 5-21, 5-22, 5-23, 6-20, 6-21, 6-22, 6-23, 7-22, 7-23, or 8-23 of any one of SEQ ID NOS: 1-96 and 193-288. In some implementations, the antisense strand comprises a nucleotide sequence according to any one of SEQ ID NOS: 1-96. In some implementations, one or more nucleotides of the antisense strand are modified.

[0564] In some implementations, the antisense strand comprises a nucleotide sequence according to any one of SEQ ID NO S: 8, 11, 14, 16, 35, 36, 38, 39, 41, 42, 52, 77, 84, 86, 87, 88, 89, 90, 93. In some implementations, one or more nucleotides of the antisense strand are modified. In some implementations, the antisense strand has a modification pattern according to nsNfsnnnNfnnnnnnnNfnNfnnnnnsnsn. In some implementations, the antisense strand comprises a modified nucleotide sequence according to any one of SEQ ID NOS: 193-288. In some implementations, the antisense strand comprises a modified nucleotide sequence according to any one of SEQ ID NOS: 200, 203, 206, 208, 227, 228, 230, 231, 233, 234, 244, 269, 276, 278, 279, 280, 281, 282, and 285.

[0565] In some implementations, the sense strand comprises at least 16 contiguous bases from any one of SEQ ID NOS: 97-192, 289-384, and 385-480. In some implementations, the sense strand comprises at least 16 contiguous bases from any one of SEQ ID NOS: 104, 107, 110, 112, 131, 132, 134, 135, 137, 138, 148, 173, 180, 182, 183, 184, 185, 186, 189, 296, 299, 302, 304, 323, 324, 326, 327, 329, 330, 340, 365, 372, 374, 375, 376, 377, 378, 381, 392, 395, 398, 400, 419, 420, 422, 423, 425 426, 436, 461, 468, 470, 471, 472, 473, 474, and 477.

[0566] In some implementations, the sense strand comprises, in order, nucleobases 1-16, 1-17, 1-18, 1-19, 1-20, 1-21, 1-22, 1-23, 2-17, 2-18, 2-19, 2-20, 2-21, 2-22, 2-23, 3-18, 3-19, 3-20, 3-21, 3-22, 3-23, 4-19, 4-20, 4-21, 4-22, 4-23, 5-21, 5-22, 5-23, 6-20, 6-21, 6-22, 6-23, 7-22, 7-23, or 8-23 of any one of SEQ ID NOS: 97-192, 289-384, and 385-480. In some implementations, the sense strand comprises a nucleobase sequence according to any one of SEQ ID NOS: 97-192. In some implementations, one or more nucleotides of the sense strand are modified. In some implementations, the sense strand comprises a nucleobase sequence according to any one of SEQ ID NOS: 104, 107, 110, 112, 131, 132, 134, 135, 137, 138, 148, 173, 180, 182, 183, 184, 185, 186, and 189. In some implementations, one or more nucleotides of the sense strand are modified. In some implementations, the sense strand has a modification pattern according to nsnsnnnnNfnNfNfNfnnnnnnnnsnsn. In some implementations, the sense strand has a modification pattern according to nsnsnnnnNfnNfNfNfnnnnnnnnnn.

[0567] In some implementations, the sense strand comprises a modified nucleotide sequence according to any one of SEQ ID NOS: 289-384 and 385-480. In some implementations, the sense strand comprises a modified nucleotide sequence according to any one of SEQ ID NOS: 296, 299, 302, 304, 323, 324, 326, 327, 329, 330, 340, 365, 372, 374, 375, 376, 377, 378, 381, 392, 395, 398, 400, 419, 420, 422, 423, 425 426, 436, 461, 468, 470, 471, 472, 473, 474, and 477.

[0568] In some implementations, (a) the sense strand comprises a nucleobase sequence according to SEQ ID NO: 97 and the antisense strand comprises a nucleobase sequence according to SEQ ID NO: 1;
[0569] (b) the sense strand comprises a nucleobase sequence according to SEQ ID NO: 98 and the antisense strand comprises a nucleobase sequence according to SEQ ID NO: 2;
[0570] (c) the sense strand comprises a nucleobase sequence according to SEQ ID NO: 99 and the antisense strand comprises a nucleobase sequence according to SEQ ID NO: 3;
[0571] (d) the sense strand comprises a nucleobase sequence according to SEQ ID NO: 100 and the antisense strand comprises a nucleobase sequence according to SEQ ID NO: 4;
[0572] (e) the sense strand comprises a nucleobase sequence according to SEQ ID NO: 101 and the antisense strand comprises a nucleobase sequence according to SEQ ID NO: 5;
[0573] (f) the sense strand comprises a nucleobase sequence according to SEQ ID NO: 102 and the antisense strand comprises a nucleobase sequence according to SEQ ID NO: 6;
[0574] (g) the sense strand comprises a nucleobase sequence according to SEQ ID NO: 103 and the antisense strand comprises a nucleobase sequence according to SEQ ID NO: 7;
[0575] (h) the sense strand comprises a nucleobase sequence according to SEQ ID NO: 104 and the antisense strand comprises a nucleobase sequence according to SEQ ID NO: 8;
[0576] (i) the sense strand comprises a nucleobase sequence according to SEQ ID NO: 105 and the antisense strand comprises a nucleobase sequence according to SEQ ID NO: 9;
[0577] (j) the sense strand comprises a nucleobase sequence according to SEQ ID NO: 106 and the antisense strand comprises a nucleobase sequence according to SEQ ID NO: 10;
[0578] (k) the sense strand comprises a nucleobase sequence according to SEQ ID NO: 107 and the antisense strand comprises a nucleobase sequence according to SEQ ID NO: 11;
[0579] (l) the sense strand comprises a nucleobase sequence according to SEQ ID NO: 108 and the antisense strand comprises a nucleobase sequence according to SEQ ID NO: 12;
[0580] (m) the sense strand comprises a nucleobase sequence according to SEQ ID NO: 109 and the antisense strand comprises a nucleobase sequence according to SEQ ID NO: 13;
[0581] (n) the sense strand comprises a nucleobase sequence according to SEQ ID NO: 110 and the antisense strand comprises a nucleobase sequence according to SEQ ID NO: 14;
[0582] (o) the sense strand comprises a nucleobase sequence according to SEQ ID NO: 111 and the antisense strand comprises a nucleobase sequence according to SEQ ID NO: 15;
[0583] (p) the sense strand comprises a nucleobase sequence according to SEQ ID NO: 112 and the antisense strand comprises a nucleobase sequence according to SEQ ID NO: 16;
[0584] (q) the sense strand comprises a nucleobase sequence according to SEQ ID NO: 113 and the antisense strand comprises a nucleobase sequence according to SEQ ID NO: 17;
[0585] (r) the sense strand comprises a nucleobase sequence according to SEQ ID NO: 114 and the antisense strand comprises a nucleobase sequence according to SEQ ID NO: 18;
[0586] (s) the sense strand comprises a nucleobase sequence according to SEQ ID NO: 115 and the antisense strand comprises a nucleobase sequence according to SEQ ID NO: 19;
[0587] (t) the sense strand comprises a nucleobase sequence according to SEQ ID NO: 116 and the antisense strand comprises a nucleobase sequence according to SEQ ID NO: 20;
[0588] (u) the sense strand comprises a nucleobase sequence according to SEQ ID NO: 117 and the antisense strand comprises a nucleobase sequence according to SEQ ID NO: 21;
[0589] (v) the sense strand comprises a nucleobase sequence according to SEQ ID NO: 118 and the antisense strand comprises a nucleobase sequence according to SEQ ID NO: 22;
[0590] (w) the sense strand comprises a nucleobase sequence according to SEQ ID NO: 119 and the antisense strand comprises a nucleobase sequence according to SEQ ID NO: 23;
[0591] (x) the sense strand comprises a nucleobase sequence according to SEQ ID NO: 120 and the antisense strand comprises a nucleobase sequence according to SEQ ID NO: 24;
[0592] (y) the sense strand comprises a nucleobase sequence according to SEQ ID NO: 121 and the antisense strand comprises a nucleobase sequence according to SEQ ID NO: 25;
[0593] (z) the sense strand comprises a nucleobase sequence according to SEQ ID NO: 122 and the antisense strand comprises a nucleobase sequence according to SEQ ID NO: 26;
[0594] (aa) the sense strand comprises a nucleobase sequence according to SEQ ID NO: 123 and the antisense strand comprises a nucleobase sequence according to SEQ ID NO: 27;
[0595] (bb) the sense strand comprises a nucleobase sequence according to SEQ ID NO: 124 and the antisense strand comprises a nucleobase sequence according to SEQ ID NO: 28;
[0596] (cc) the sense strand comprises a nucleobase sequence according to SEQ ID NO: 125 and the antisense strand comprises a nucleobase sequence according to SEQ ID NO: 29;
[0597] (dd) the sense strand comprises a nucleobase sequence according to SEQ ID NO: 126 and the antisense strand comprises a nucleobase sequence according to SEQ ID NO: 30;
[0598] (ee) the sense strand comprises a nucleobase sequence according to SEQ ID NO: 127 and the antisense strand comprises a nucleobase sequence according to SEQ ID NO: 31;
[0599] (ff) the sense strand comprises a nucleobase sequence according to SEQ ID NO: 128 and the antisense strand comprises a nucleobase sequence according to SEQ ID NO: 32;
[0600] (gg) the sense strand comprises a nucleobase sequence according to SEQ ID NO: 129 and the antisense strand comprises a nucleobase sequence according to SEQ ID NO: 33;
[0601] (hh) the sense strand comprises a nucleobase sequence according to SEQ ID NO: 130 and the antisense strand comprises a nucleobase sequence according to SEQ ID NO: 34;
[0602] (ii) the sense strand comprises a nucleobase sequence according to SEQ ID NO: 131 and the antisense strand comprises a nucleobase sequence according to SEQ ID NO: 35;
[0603] (jj) the sense strand comprises a nucleobase sequence according to SEQ ID NO: 132 and the antisense strand comprises a nucleobase sequence according to SEQ ID NO: 36;
[0604] (kk) the sense strand comprises a nucleobase sequence according to SEQ ID NO: 133 and the antisense strand comprises a nucleobase sequence according to SEQ ID NO: 37;
[0605] (ll) the sense strand comprises a nucleobase sequence according to SEQ ID NO: 134 and the antisense strand comprises a nucleobase sequence according to SEQ ID NO: 38;
[0606] (mm) the sense strand comprises a nucleobase sequence according to SEQ ID NO: 135 and the antisense strand comprises a nucleobase sequence according to SEQ ID NO: 39;
[0607] (nn) the sense strand comprises a nucleobase sequence according to SEQ ID NO: 136 and the antisense strand comprises a nucleobase sequence according to SEQ ID NO: 40;
[0608] (oo) the sense strand comprises a nucleobase sequence according to SEQ ID NO: 137 and the antisense strand comprises a nucleobase sequence according to SEQ ID NO: 41;
[0609] (pp) the sense strand comprises a nucleobase sequence according to SEQ ID NO: 138 and the antisense strand comprises a nucleobase sequence according to SEQ ID NO: 42;
[0610] (qq) the sense strand comprises a nucleobase sequence according to SEQ ID NO: 139 and the antisense strand comprises a nucleobase sequence according to SEQ ID NO: 43;
[0611] (rr) the sense strand comprises a nucleobase sequence according to SEQ ID NO: 140 and the antisense strand comprises a nucleobase sequence according to SEQ ID NO: 44;
[0612] (ss) the sense strand comprises a nucleobase sequence according to SEQ ID NO: 141 and the antisense strand comprises a nucleobase sequence according to SEQ ID NO: 45;
[0613] (tt) the sense strand comprises a nucleobase sequence according to SEQ ID NO: 142 and the antisense strand comprises a nucleobase sequence according to SEQ ID NO: 46;
[0614] (uu) the sense strand comprises a nucleobase sequence according to SEQ ID NO: 143 and the antisense strand comprises a nucleobase sequence according to SEQ ID NO: 47;
[0615] (vv) the sense strand comprises a nucleobase sequence according to SEQ ID NO: 144 and the antisense strand comprises a nucleobase sequence according to SEQ ID NO: 48;
[0616] (ww) the sense strand comprises a nucleobase sequence according to SEQ ID NO: 145 and the antisense strand comprises a nucleobase sequence according to SEQ ID NO: 49;
[0617] (xx) the sense strand comprises a nucleobase sequence according to SEQ ID NO: 146 and the antisense strand comprises a nucleobase sequence according to SEQ ID NO: 50;
[0618] (yy) the sense strand comprises a nucleobase sequence according to SEQ ID NO: 147 and the antisense strand comprises a nucleobase sequence according to SEQ ID NO: 51;
[0619] (zz) the sense strand comprises a nucleobase sequence according to SEQ ID NO: 148 and the antisense strand comprises a nucleobase sequence according to SEQ ID NO: 52;
[0620] (aaa) the sense strand comprises a nucleobase sequence according to SEQ ID NO: 149 and the antisense strand comprises a nucleobase sequence according to SEQ ID NO: 53;
[0621] (bbb) the sense strand comprises a nucleobase sequence according to SEQ ID NO: 150 and the antisense strand comprises a nucleobase sequence according to SEQ ID NO: 54;
[0622] (ccc) the sense strand comprises a nucleobase sequence according to SEQ ID NO: 151 and the antisense strand comprises a nucleobase sequence according to SEQ ID NO: 55;
[0623] (ddd) the sense strand comprises a nucleobase sequence according to SEQ ID NO: 152 and the antisense strand comprises a nucleobase sequence according to SEQ ID NO: 56;
[0624] (eee) the sense strand comprises a nucleobase sequence according to SEQ ID NO: 153 and the antisense strand comprises a nucleobase sequence according to SEQ ID NO: 57;
[0625] (fff) the sense strand comprises a nucleobase sequence according to SEQ ID NO: 154 and the antisense strand comprises a nucleobase sequence according to SEQ ID NO: 58;
[0626] (ggg) the sense strand comprises a nucleobase sequence according to SEQ ID NO: 155 and the antisense strand comprises a nucleobase sequence according to SEQ ID NO: 59;
[0627] (hhh) the sense strand comprises a nucleobase sequence according to SEQ ID NO: 156 and the antisense strand comprises a nucleobase sequence according to SEQ ID NO: 60;
[0628] (iii) the sense strand comprises a nucleobase sequence according to SEQ ID NO: 157 and the antisense strand comprises a nucleobase sequence according to SEQ ID NO: 61;
[0629] (jjj) the sense strand comprises a nucleobase sequence according to SEQ ID NO: 158 and the antisense strand comprises a nucleobase sequence according to SEQ ID NO: 62;
[0630] (kkk) the sense strand comprises a nucleobase sequence according to SEQ ID NO: 159 and the antisense strand comprises a nucleobase sequence according to SEQ ID NO: 63;
[0631] (lll) the sense strand comprises a nucleobase sequence according to SEQ ID NO: 160 and the antisense strand comprises a nucleobase sequence according to SEQ ID NO: 64;
[0632] (mmm) the sense strand comprises a nucleobase sequence according to SEQ ID NO: 161 and the antisense strand comprises a nucleobase sequence according to SEQ ID NO: 65;
[0633] (nnn) the sense strand comprises a nucleobase sequence according to SEQ ID NO: 162 and the antisense strand comprises a nucleobase sequence according to SEQ ID NO: 66;
[0634] (ooo) the sense strand comprises a nucleobase sequence according to SEQ ID NO: 163 and the antisense strand comprises a nucleobase sequence according to SEQ ID NO: 67;
[0635] (ppp) the sense strand comprises a nucleobase sequence according to SEQ ID NO: 164 and the antisense strand comprises a nucleobase sequence according to SEQ ID NO: 68;
[0636] (qqq) the sense strand comprises a nucleobase sequence according to SEQ ID NO: 165 and the antisense strand comprises a nucleobase sequence according to SEQ ID NO: 69;
[0637] (rrr) the sense strand comprises a nucleobase sequence according to SEQ ID NO: 166 and the antisense strand comprises a nucleobase sequence according to SEQ ID NO: 70;
[0638] (sss) the sense strand comprises a nucleobase sequence according to SEQ ID NO: 167 and the antisense strand comprises a nucleobase sequence according to SEQ ID NO: 71;
[0639] (ttt) the sense strand comprises a nucleobase sequence according to SEQ ID NO: 168 and the antisense strand comprises a nucleobase sequence according to SEQ ID NO: 72;
[0640] (uuu) the sense strand comprises a nucleobase sequence according to SEQ ID NO: 169 and the antisense strand comprises a nucleobase sequence according to SEQ ID NO: 73;
[0641] (vvv) the sense strand comprises a nucleobase sequence according to SEQ ID NO: 170 and the antisense strand comprises a nucleobase sequence according to SEQ ID NO: 74;
[0642] (www) the sense strand comprises a nucleobase sequence according to SEQ ID NO: 171 and the antisense strand comprises a nucleobase sequence according to SEQ ID NO: 75;
[0643] (xxx) the sense strand comprises a nucleobase sequence according to SEQ ID NO: 172 and the antisense strand comprises a nucleobase sequence according to SEQ ID NO: 76;
[0644] (yyy) the sense strand comprises a nucleobase sequence according to SEQ ID NO: 173 and the antisense strand comprises a nucleobase sequence according to SEQ ID NO: 77;
[0645] (zzz) the sense strand comprises a nucleobase sequence according to SEQ ID NO: 174 and the antisense strand comprises a nucleobase sequence according to SEQ ID NO: 78;
[0646] (aaaa) the sense strand comprises a nucleobase sequence according to SEQ ID NO: 175 and the antisense strand comprises a nucleobase sequence according to SEQ ID NO: 79;
[0647] (bbbb) the sense strand comprises a nucleobase sequence according to SEQ ID NO: 176 and the antisense strand comprises a nucleobase sequence according to SEQ ID NO: 80;
[0648] (cccc) the sense strand comprises a nucleobase sequence according to SEQ ID NO: 177 and the antisense strand comprises a nucleobase sequence according to SEQ ID NO: 81;
[0649] (dddd) the sense strand comprises a nucleobase sequence according to SEQ ID NO: 178 and the antisense strand comprises a nucleobase sequence according to SEQ ID NO: 82;
[0650] (eeee) the sense strand comprises a nucleobase sequence according to SEQ ID NO: 179 and the antisense strand comprises a nucleobase sequence according to SEQ ID NO: 83;
[0651] (ffff) the sense strand comprises a nucleobase sequence according to SEQ ID NO: 180 and the antisense strand comprises a nucleobase sequence according to SEQ ID NO: 84;
[0652] (gggg) the sense strand comprises a nucleobase sequence according to SEQ ID NO: 181 and the antisense strand comprises a nucleobase sequence according to SEQ ID NO: 85;
[0653] (hhhh) the sense strand comprises a nucleobase sequence according to SEQ ID NO: 182 and the antisense strand comprises a nucleobase sequence according to SEQ ID NO: 86;
[0654] (iiii) the sense strand comprises a nucleobase sequence according to SEQ ID NO: 183 and the antisense strand comprises a nucleobase sequence according to SEQ ID NO: 87;
[0655] (jjjj) the sense strand comprises a nucleobase sequence according to SEQ ID NO: 184 and the antisense strand comprises a nucleobase sequence according to SEQ ID NO: 88;
[0656] (kkkk) the sense strand comprises a nucleobase sequence according to SEQ ID NO: 185 and the antisense strand comprises a nucleobase sequence according to SEQ ID NO: 89;
[0657] (llll) the sense strand comprises a nucleobase sequence according to SEQ ID NO: 186 and the antisense strand comprises a nucleobase sequence according to SEQ ID NO: 90;
[0658] (mmmm) the sense strand comprises a nucleobase sequence according to SEQ ID NO: 187 and the antisense strand comprises a nucleobase sequence according to SEQ ID NO: 91;
[0659] (nnnn) the sense strand comprises a nucleobase sequence according to SEQ ID NO: 188 and the antisense strand comprises a nucleobase sequence according to SEQ ID NO: 92;
[0660] (oooo) the sense strand comprises a nucleobase sequence according to SEQ ID NO: 189 and the antisense strand comprises a nucleobase sequence according to SEQ ID NO: 93;
[0661] (pppp) the sense strand comprises a nucleobase sequence according to SEQ ID NO: 190 and the antisense strand comprises a nucleobase sequence according to SEQ ID NO: 94;
[0662] (qqqq) the sense strand comprises a nucleobase sequence according to SEQ ID NO: 191 and the antisense strand comprises a nucleobase sequence according to SEQ ID NO: 95; or
[0663] (rrrr) the sense strand comprises a nucleobase sequence according to SEQ ID NO: 192 and the antisense strand comprises a nucleobase sequence according to SEQ ID NO: 96.

[0664] In some implementations, (a) the sense strand comprises a nucleobase sequence according to SEQ ID NO: 104 and the antisense strand comprises a nucleobase sequence according to SEQ ID NO: 8;
[0665] (b) the sense strand comprises a nucleobase sequence according to SEQ ID NO: 107 and the antisense strand comprises a nucleobase sequence according to SEQ ID NO: 11;
[0666] (c) the sense strand comprises a nucleobase sequence according to SEQ ID NO: 110 and the antisense strand comprises a nucleobase sequence according to SEQ ID NO: 14;
[0667] (d) the sense strand comprises a nucleobase sequence according to SEQ ID NO: 112 and the antisense strand comprises a nucleobase sequence according to SEQ ID NO: 16;
[0668] (e) the sense strand comprises a nucleobase sequence according to SEQ ID NO: 131 and the antisense strand comprises a nucleobase sequence according to SEQ ID NO: 35;
[0669] (f) the sense strand comprises a nucleobase sequence according to SEQ ID NO: 132 and the antisense strand comprises a nucleobase sequence according to SEQ ID NO: 36;
[0670] (g) the sense strand comprises a nucleobase sequence according to SEQ ID NO: 134 and the antisense strand comprises a nucleobase sequence according to SEQ ID NO: 38;
[0671] (h) the sense strand comprises a nucleobase sequence according to SEQ ID NO: 135 and the antisense strand comprises a nucleobase sequence according to SEQ ID NO: 39;
[0672] (i) the sense strand comprises a nucleobase sequence according to SEQ ID NO: 137 and the antisense strand comprises a nucleobase sequence according to SEQ ID NO: 41;
[0673] (j) the sense strand comprises a nucleobase sequence according to SEQ ID NO: 138 and the antisense strand comprises a nucleobase sequence according to SEQ ID NO: 42;
[0674] (k) the sense strand comprises a nucleobase sequence according to SEQ ID NO: 148 and the antisense strand comprises a nucleobase sequence according to SEQ ID NO: 52;
[0675] (l) the sense strand comprises a nucleobase sequence according to SEQ ID NO: 173 and the antisense strand comprises a nucleobase sequence according to SEQ ID NO: 77.
[0676] (m) the sense strand comprises a nucleobase sequence according to SEQ ID NO: 180 and the antisense strand comprises a nucleobase sequence according to SEQ ID NO: 84;
[0677] (n) the sense strand comprises a nucleobase sequence according to SEQ ID NO: 182 and the antisense strand comprises a nucleobase sequence according to SEQ ID NO: 86;
[0678] (o) the sense strand comprises a nucleobase sequence according to SEQ ID NO: 183 and the antisense strand comprises a nucleobase sequence according to SEQ ID NO: 87;
[0679] (p) the sense strand comprises a nucleobase sequence according to SEQ ID NO: 184 and the antisense strand comprises a nucleobase sequence according to SEQ ID NO: 88;
[0680] (q) the sense strand comprises a nucleobase sequence according to SEQ ID NO: 185 and the antisense strand comprises a nucleobase sequence according to SEQ ID NO: 89;
[0681] (r) the sense strand comprises a nucleobase sequence according to SEQ ID NO: 186 and the antisense strand comprises a nucleobase sequence according to SEQ ID NO: 90; or(s) the sense strand comprises a nucleobase sequence according to SEQ ID NO: 189 and the antisense strand comprises a nucleobase sequence according to SEQ ID NO: 93.

[0682] In some implementations, (a) the sense strand comprises a modified nucleotide sequence according to SEQ ID NO: 289 and the antisense strand comprises a modified nucleotide sequence according to SEQ ID NO: 193;
[0683] (b) the sense strand comprises a modified nucleotide sequence according to SEQ ID NO: 290 and the antisense strand comprises a modified nucleotide sequence according to SEQ ID NO: 194;
[0684] (c) the sense strand comprises a modified nucleotide sequence according to SEQ ID NO: 291 and the antisense strand comprises a modified nucleotide sequence according to SEQ ID NO: 195;
[0685] (d) the sense strand comprises a modified nucleotide sequence according to SEQ ID NO: 292 and the antisense strand comprises a modified nucleotide sequence according to SEQ ID NO: 196;
[0686] (e) the sense strand comprises a modified nucleotide sequence according to SEQ ID NO: 293 and the antisense strand comprises a modified nucleotide sequence according to SEQ ID NO: 197;
[0687] (f) the sense strand comprises a modified nucleotide sequence according to SEQ ID NO: 294 and the antisense strand comprises a modified nucleotide sequence according to SEQ ID NO: 198;
[0688] (g) the sense strand comprises a modified nucleotide sequence according to SEQ ID NO: 295 and the antisense strand comprises a modified nucleotide sequence according to SEQ ID NO: 199;
[0689] (h) the sense strand comprises a modified nucleotide sequence according to SEQ ID NO: 296 and the antisense strand comprises a modified nucleotide sequence according to SEQ ID NO: 200;
[0690] (i) the sense strand comprises a modified nucleotide sequence according to SEQ ID NO: 297 and the antisense strand comprises a modified nucleotide sequence according to SEQ ID NO: 201;
[0691] (j) the sense strand comprises a modified nucleotide sequence according to SEQ ID NO: 298 and the antisense strand comprises a modified nucleotide sequence according to SEQ ID NO: 202;
[0692] (k) the sense strand comprises a modified nucleotide sequence according to SEQ ID NO: 299 and the antisense strand comprises a modified nucleotide sequence according to SEQ ID NO: 203;
[0693] (l) the sense strand comprises a modified nucleotide sequence according to SEQ ID NO: 300 and the antisense strand comprises a modified nucleotide sequence according to SEQ ID NO: 204;
[0694] (m) the sense strand comprises a modified nucleotide sequence according to SEQ ID NO: 301 and the antisense strand comprises a modified nucleotide sequence according to SEQ ID NO: 205;
[0695] (n) the sense strand comprises a modified nucleotide sequence according to SEQ ID NO: 302 and the antisense strand comprises a modified nucleotide sequence according to SEQ ID NO: 206;
[0696] (o) the sense strand comprises a modified nucleotide sequence according to SEQ ID NO: 303 and the antisense strand comprises a modified nucleotide sequence according to SEQ ID NO: 207;
[0697] (p) the sense strand comprises a modified nucleotide sequence according to SEQ ID NO: 304 and the antisense strand comprises a modified nucleotide sequence according to SEQ ID NO: 208;
[0698] (q) the sense strand comprises a modified nucleotide sequence according to SEQ ID NO: 305 and the antisense strand comprises a modified nucleotide sequence according to SEQ ID NO: 209;
[0699] (r) the sense strand comprises a modified nucleotide sequence according to SEQ ID NO: 306 and the antisense strand comprises a modified nucleotide sequence according to SEQ ID NO: 210;
[0700] (s) the sense strand comprises a modified nucleotide sequence according to SEQ ID NO: 307 and the antisense strand comprises a modified nucleotide sequence according to SEQ ID NO: 211;
[0701] (t) the sense strand comprises a modified nucleotide sequence according to SEQ ID NO: 308 and the antisense strand comprises a modified nucleotide sequence according to SEQ ID NO: 212;
[0702] (u) the sense strand comprises a modified nucleotide sequence according to SEQ ID NO: 309 and the antisense strand comprises a modified nucleotide sequence according to SEQ ID NO: 213;
[0703] (v) the sense strand comprises a modified nucleotide sequence according to SEQ ID NO: 310 and the antisense strand comprises a modified nucleotide sequence according to SEQ ID NO: 214;
[0704] (w) the sense strand comprises a modified nucleotide sequence according to SEQ ID NO: 311 and the antisense strand comprises a modified nucleotide sequence according to SEQ ID NO: 215;
[0705] (x) the sense strand comprises a modified nucleotide sequence according to SEQ ID NO: 312 and the antisense strand comprises a modified nucleotide sequence according to SEQ ID NO: 216;
[0706] (y) the sense strand comprises a modified nucleotide sequence according to SEQ ID NO: 313 and the antisense strand comprises a modified nucleotide sequence according to SEQ ID NO: 217;
[0707] (z) the sense strand comprises a modified nucleotide sequence according to SEQ ID NO: 314 and the antisense strand comprises a modified nucleotide sequence according to SEQ ID NO: 218;
[0708] (aa) the sense strand comprises a modified nucleotide sequence according to SEQ ID NO: 315 and the antisense strand comprises a modified nucleotide sequence according to SEQ ID NO: 219;
[0709] (bb) the sense strand comprises a modified nucleotide sequence according to SEQ ID NO: 316 and the antisense strand comprises a modified nucleotide sequence according to SEQ ID NO: 220;
[0710] (cc) the sense strand comprises a modified nucleotide sequence according to SEQ ID NO: 317 and the antisense strand comprises a modified nucleotide sequence according to SEQ ID NO: 221;
[0711] (dd) the sense strand comprises a modified nucleotide sequence according to SEQ ID NO: 318 and the antisense strand comprises a modified nucleotide sequence according to SEQ ID NO: 222;
[0712] (ee) the sense strand comprises a modified nucleotide sequence according to SEQ ID NO: 319 and the antisense strand comprises a modified nucleotide sequence according to SEQ ID NO: 223;
[0713] (ff) the sense strand comprises a modified nucleotide sequence according to SEQ ID NO: 320 and the antisense strand comprises a modified nucleotide sequence according to SEQ ID NO: 224;
[0714] (gg) the sense strand comprises a modified nucleotide sequence according to SEQ ID NO: 321 and the antisense strand comprises a modified nucleotide sequence according to SEQ ID NO: 225;
[0715] (hh) the sense strand comprises a modified nucleotide sequence according to SEQ ID NO: 322 and the antisense strand comprises a modified nucleotide sequence according to SEQ ID NO: 226;
[0716] (ii) the sense strand comprises a modified nucleotide sequence according to SEQ ID NO: 323 and the antisense strand comprises a modified nucleotide sequence according to SEQ ID NO: 227;
[0717] (jj) the sense strand comprises a modified nucleotide sequence according to SEQ ID NO: 324 and the antisense strand comprises a modified nucleotide sequence according to SEQ ID NO: 228;
[0718] (kk) the sense strand comprises a modified nucleotide sequence according to SEQ ID NO: 325 and the antisense strand comprises a modified nucleotide sequence according to SEQ ID NO: 229;
[0719] (ll) the sense strand comprises a modified nucleotide sequence according to SEQ ID NO: 326 and the antisense strand comprises a modified nucleotide sequence according to SEQ ID NO: 230;
[0720] (mm) the sense strand comprises a modified nucleotide sequence according to SEQ ID NO: 327 and the antisense strand comprises a modified nucleotide sequence according to SEQ ID NO: 231;
[0721] (nn) the sense strand comprises a modified nucleotide sequence according to SEQ ID NO: 328 and the antisense strand comprises a modified nucleotide sequence according to SEQ ID NO: 232;
[0722] (oo) the sense strand comprises a modified nucleotide sequence according to SEQ ID NO: 329 and the antisense strand comprises a modified nucleotide sequence according to SEQ ID NO: 233;
[0723] (pp) the sense strand comprises a modified nucleotide sequence according to SEQ ID NO: 330 and the antisense strand comprises a modified nucleotide sequence according to SEQ ID NO: 234;
[0724] (qq) the sense strand comprises a modified nucleotide sequence according to SEQ ID NO: 331 and the antisense strand comprises a modified nucleotide sequence according to SEQ ID NO: 235;
[0725] (rr) the sense strand comprises a modified nucleotide sequence according to SEQ ID NO: 332 and the antisense strand comprises a modified nucleotide sequence according to SEQ ID NO: 236;
[0726] (ss) the sense strand comprises a modified nucleotide sequence according to SEQ ID NO: 333 and the antisense strand comprises a modified nucleotide sequence according to SEQ ID NO: 237;
[0727] (tt) the sense strand comprises a modified nucleotide sequence according to SEQ ID NO: 334 and the antisense strand comprises a modified nucleotide sequence according to SEQ ID NO: 238;
[0728] (uu) the sense strand comprises a modified nucleotide sequence according to SEQ ID NO: 335 and the antisense strand comprises a modified nucleotide sequence according to SEQ ID NO: 239;
[0729] (vv) the sense strand comprises a modified nucleotide sequence according to SEQ ID NO: 336 and the antisense strand comprises a modified nucleotide sequence according to SEQ ID NO: 240;
[0730] (ww) the sense strand comprises a modified nucleotide sequence according to SEQ ID NO: 337 and the antisense strand comprises a modified nucleotide sequence according to SEQ ID NO: 241;
[0731] (xx) the sense strand comprises a modified nucleotide sequence according to SEQ ID NO: 338 and the antisense strand comprises a modified nucleotide sequence according to SEQ ID NO: 242;
[0732] (yy) the sense strand comprises a modified nucleotide sequence according to SEQ ID NO: 339 and the antisense strand comprises a modified nucleotide sequence according to SEQ ID NO: 243;
[0733] (zz) the sense strand comprises a modified nucleotide sequence according to SEQ ID NO: 340 and the antisense strand comprises a modified nucleotide sequence according to SEQ ID NO: 244;
[0734] (aaa) the sense strand comprises a modified nucleotide sequence according to SEQ ID NO: 341 and the antisense strand comprises a modified nucleotide sequence according to SEQ ID NO: 245;
[0735] (bbb) the sense strand comprises a modified nucleotide sequence according to SEQ ID NO: 342 and the antisense strand comprises a modified nucleotide sequence according to SEQ ID NO: 246;
[0736] (ccc) the sense strand comprises a modified nucleotide sequence according to SEQ ID NO: 343 and the antisense strand comprises a modified nucleotide sequence according to SEQ ID NO: 247;
[0737] (ddd) the sense strand comprises a modified nucleotide sequence according to SEQ ID NO: 344 and the antisense strand comprises a modified nucleotide sequence according to SEQ ID NO: 248;
[0738] (eee) the sense strand comprises a modified nucleotide sequence according to SEQ ID NO: 345 and the antisense strand comprises a modified nucleotide sequence according to SEQ ID NO: 249;
[0739] (fff) the sense strand comprises a modified nucleotide sequence according to SEQ ID NO: 346 and the antisense strand comprises a modified nucleotide sequence according to SEQ ID NO: 250;
[0740] (ggg) the sense strand comprises a modified nucleotide sequence according to SEQ ID NO: 347 and the antisense strand comprises a modified nucleotide sequence according to SEQ ID NO: 251;
[0741] (hhh) the sense strand comprises a modified nucleotide sequence according to SEQ ID NO: 348 and the antisense strand comprises a modified nucleotide sequence according to SEQ ID NO: 252;
[0742] (iii) the sense strand comprises a modified nucleotide sequence according to SEQ ID NO: 349 and the antisense strand comprises a modified nucleotide sequence according to SEQ ID NO: 253;
[0743] (jjj) the sense strand comprises a modified nucleotide sequence according to SEQ ID NO: 350 and the antisense strand comprises a modified nucleotide sequence according to SEQ ID NO: 254;
[0744] (kkk) the sense strand comprises a modified nucleotide sequence according to SEQ ID NO: 351 and the antisense strand comprises a modified nucleotide sequence according to SEQ ID NO: 255;
[0745] (lll) the sense strand comprises a modified nucleotide sequence according to SEQ ID NO: 352 and the antisense strand comprises a modified nucleotide sequence according to SEQ ID NO: 256;
[0746] (mmm) the sense strand comprises a modified nucleotide sequence according to SEQ ID NO: 353 and the antisense strand comprises a modified nucleotide sequence according to SEQ ID NO: 257;
[0747] (nnn) the sense strand comprises a modified nucleotide sequence according to SEQ ID NO: 354 and the antisense strand comprises a modified nucleotide sequence according to SEQ ID NO: 258;
[0748] (ooo) the sense strand comprises a modified nucleotide sequence according to SEQ ID NO: 355 and the antisense strand comprises a modified nucleotide sequence according to SEQ ID NO: 259;
[0749] (ppp) the sense strand comprises a modified nucleotide sequence according to SEQ ID NO: 356 and the antisense strand comprises a modified nucleotide sequence according to SEQ ID NO: 260;
[0750] (qqq) the sense strand comprises a modified nucleotide sequence according to SEQ ID NO: 357 and the antisense strand comprises a modified nucleotide sequence according to SEQ ID NO: 261;
[0751] (rrr) the sense strand comprises a modified nucleotide sequence according to SEQ ID NO: 358 and the antisense strand comprises a modified nucleotide sequence according to SEQ ID NO: 262;
[0752] (sss) the sense strand comprises a modified nucleotide sequence according to SEQ ID NO: 359 and the antisense strand comprises a modified nucleotide sequence according to SEQ ID NO: 263;
[0753] (ttt) the sense strand comprises a modified nucleotide sequence according to SEQ ID NO: 360 and the antisense strand comprises a modified nucleotide sequence according to SEQ ID NO: 264;
[0754] (uuu) the sense strand comprises a modified nucleotide sequence according to SEQ ID NO: 361 and the antisense strand comprises a modified nucleotide sequence according to SEQ ID NO: 265;
[0755] (vvv) the sense strand comprises a modified nucleotide sequence according to SEQ ID NO: 362 and the antisense strand comprises a modified nucleotide sequence according to SEQ ID NO: 266;
[0756] (www) the sense strand comprises a modified nucleotide sequence according to SEQ ID NO: 363 and the antisense strand comprises a modified nucleotide sequence according to SEQ ID NO: 267;
[0757] (xxx) the sense strand comprises a modified nucleotide sequence according to SEQ ID NO: 364 and the antisense strand comprises a modified nucleotide sequence according to SEQ ID NO: 268;
[0758] (yyy) the sense strand comprises a modified nucleotide sequence according to SEQ ID NO: 365 and the antisense strand comprises a modified nucleotide sequence according to SEQ ID NO: 269;
[0759] (zzz) the sense strand comprises a modified nucleotide sequence according to SEQ ID NO: 366 and the antisense strand comprises a modified nucleotide sequence according to SEQ ID NO: 270;
[0760] (aaaa) the sense strand comprises a modified nucleotide sequence according to SEQ ID NO: 367 and the antisense strand comprises a modified nucleotide sequence according to SEQ ID NO: 271;
[0761] (bbbb) the sense strand comprises a modified nucleotide sequence according to SEQ ID NO: 368 and the antisense strand comprises a modified nucleotide sequence according to SEQ ID NO: 272;
[0762] (cccc) the sense strand comprises a modified nucleotide sequence according to SEQ ID NO: 369 and the antisense strand comprises a modified nucleotide sequence according to SEQ ID NO: 273;
[0763] (dddd) the sense strand comprises a modified nucleotide sequence according to SEQ ID NO: 370 and the antisense strand comprises a modified nucleotide sequence according to SEQ ID NO: 274;
[0764] (eeee) the sense strand comprises a modified nucleotide sequence according to SEQ ID NO: 371 and the antisense strand comprises a modified nucleotide sequence according to SEQ ID NO: 275;
[0765] (ffff) the sense strand comprises a modified nucleotide sequence according to SEQ ID NO: 372 and the antisense strand comprises a modified nucleotide sequence according to SEQ ID NO: 276;
[0766] (gggg) the sense strand comprises a modified nucleotide sequence according to SEQ ID NO: 373 and the antisense strand comprises a modified nucleotide sequence according to SEQ ID NO: 277;
[0767] (hhhh) the sense strand comprises a modified nucleotide sequence according to SEQ ID NO: 374 and the antisense strand comprises a modified nucleotide sequence according to SEQ ID NO: 278;
[0768] (iiii) the sense strand comprises a modified nucleotide sequence according to SEQ ID NO: 375 and the antisense strand comprises a modified nucleotide sequence according to SEQ ID NO: 279;
[0769] (jjjj) the sense strand comprises a modified nucleotide sequence according to SEQ ID NO: 376 and the antisense strand comprises a modified nucleotide sequence according to SEQ ID NO: 280;
[0770] (kkkk) the sense strand comprises a modified nucleotide sequence according to SEQ ID NO: 377 and the antisense strand comprises a modified nucleotide sequence according to SEQ ID NO: 281;
[0771] (llll) the sense strand comprises a modified nucleotide sequence according to SEQ ID NO: 378 and the antisense strand comprises a modified nucleotide sequence according to SEQ ID NO: 282;
[0772] (mmmm) the sense strand comprises a modified nucleotide sequence according to SEQ ID NO: 379 and the antisense strand comprises a modified nucleotide sequence according to SEQ ID NO: 283;
[0773] (nnnn) the sense strand comprises a modified nucleotide sequence according to SEQ ID NO: 380 and the antisense strand comprises a modified nucleotide sequence according to SEQ ID NO: 284;
[0774] (oooo) the sense strand comprises a modified nucleotide sequence according to SEQ ID NO: 381 and the antisense strand comprises a modified nucleotide sequence according to SEQ ID NO: 285;
[0775] (pppp) the sense strand comprises a modified nucleotide sequence according to SEQ ID NO: 382 and the antisense strand comprises a modified nucleotide sequence according to SEQ ID NO: 286;
[0776] (qqqq) the sense strand comprises a modified nucleotide sequence according to SEQ ID NO: 383 and the antisense strand comprises a modified nucleotide sequence according to SEQ ID NO: 287;
[0777] (rrrr) the sense strand comprises a modified nucleotide sequence according to SEQ ID NO: 384 and the antisense strand comprises a modified nucleotide sequence according to SEQ ID NO: 288;
[0778] (ssss) the sense strand comprises a modified nucleotide sequence according to SEQ ID NO: 385 and the antisense strand comprises a modified nucleotide sequence according to SEQ ID NO: 193;
[0779] (tttt) the sense strand comprises a modified nucleotide sequence according to SEQ ID NO: 386 and the antisense strand comprises a modified nucleotide sequence according to SEQ ID NO: 194;
[0780] (uuuu) the sense strand comprises a modified nucleotide sequence according to SEQ ID NO: 387 and the antisense strand comprises a modified nucleotide sequence according to SEQ ID NO: 195;
[0781] (vvvv) the sense strand comprises a modified nucleotide sequence according to SEQ ID NO: 388 and the antisense strand comprises a modified nucleotide sequence according to SEQ ID NO: 196;
[0782] (wwww) the sense strand comprises a modified nucleotide sequence according to SEQ ID NO: 389 and the antisense strand comprises a modified nucleotide sequence according to SEQ ID NO: 197;
[0783] (xxxx) the sense strand comprises a modified nucleotide sequence according to SEQ ID NO: 390 and the antisense strand comprises a modified nucleotide sequence according to SEQ ID NO: 198;
[0784] (yyyy) the sense strand comprises a modified nucleotide sequence according to SEQ ID NO: 391 and the antisense strand comprises a modified nucleotide sequence according to SEQ ID NO: 199;
[0785] (zzzz) the sense strand comprises a modified nucleotide sequence according to SEQ ID NO: 392 and the antisense strand comprises a modified nucleotide sequence according to SEQ ID NO: 200;
[0786] (aaaaa) the sense strand comprises a modified nucleotide sequence according to SEQ ID NO: 393 and the antisense strand comprises a modified nucleotide sequence according to SEQ ID NO: 201;
[0787] (bbbbb) the sense strand comprises a modified nucleotide sequence according to SEQ ID NO: 394 and the antisense strand comprises a modified nucleotide sequence according to SEQ ID NO: 202;
[0788] (ccccc) the sense strand comprises a modified nucleotide sequence according to SEQ ID NO: 395 and the antisense strand comprises a modified nucleotide sequence according to SEQ ID NO: 203;
[0789] (ddddd) the sense strand comprises a modified nucleotide sequence according to SEQ ID NO: 396 and the antisense strand comprises a modified nucleotide sequence according to SEQ ID NO: 204;
[0790] (eeeee) the sense strand comprises a modified nucleotide sequence according to SEQ ID NO: 397 and the antisense strand comprises a modified nucleotide sequence according to SEQ ID NO: 205;
[0791] (fffff) the sense strand comprises a modified nucleotide sequence according to SEQ ID NO: 398 and the antisense strand comprises a modified nucleotide sequence according to SEQ ID NO: 206;
[0792] (ggggg) the sense strand comprises a modified nucleotide sequence according to SEQ ID NO: 399 and the antisense strand comprises a modified nucleotide sequence according to SEQ ID NO: 207;
[0793] (hhhhh) the sense strand comprises a modified nucleotide sequence according to SEQ ID NO: 400 and the antisense strand comprises a modified nucleotide sequence according to SEQ ID NO: 208;
[0794] (iiiii) the sense strand comprises a modified nucleotide sequence according to SEQ ID NO: 401 and the antisense strand comprises a modified nucleotide sequence according to SEQ ID NO: 209;
[0795] (jjjjj) the sense strand comprises a modified nucleotide sequence according to SEQ ID NO: 402 and the antisense strand comprises a modified nucleotide sequence according to SEQ ID NO: 210;
[0796] (kkkkk) the sense strand comprises a modified nucleotide sequence according to SEQ ID NO: 403 and the antisense strand comprises a modified nucleotide sequence according to SEQ ID NO: 211;
[0797] (lllll) the sense strand comprises a modified nucleotide sequence according to SEQ ID NO: 404 and the antisense strand comprises a modified nucleotide sequence according to SEQ ID NO: 212;
[0798] (mmmmm) the sense strand comprises a modified nucleotide sequence according to SEQ ID NO: 405 and the antisense strand comprises a modified nucleotide sequence according to SEQ ID NO: 213;
[0799] (nnnnn) the sense strand comprises a modified nucleotide sequence according to SEQ ID NO: 406 and the antisense strand comprises a modified nucleotide sequence according to SEQ ID NO: 214;
[0800] (ooooo) the sense strand comprises a modified nucleotide sequence according to SEQ ID NO: 407 and the antisense strand comprises a modified nucleotide sequence according to SEQ ID NO: 215;
[0801] (ppppp) the sense strand comprises a modified nucleotide sequence according to SEQ ID NO: 408 and the antisense strand comprises a modified nucleotide sequence according to SEQ ID NO: 216;
[0802] (qqqqq) the sense strand comprises a modified nucleotide sequence according to SEQ ID NO: 409 and the antisense strand comprises a modified nucleotide sequence according to SEQ ID NO: 217;
[0803] (rrrrr) the sense strand comprises a modified nucleotide sequence according to SEQ ID NO: 410 and the antisense strand comprises a modified nucleotide sequence according to SEQ ID NO: 218;
[0804] (sssss) the sense strand comprises a modified nucleotide sequence according to SEQ ID NO: 411 and the antisense strand comprises a modified nucleotide sequence according to SEQ ID NO: 219;
[0805] (ttttt) the sense strand comprises a modified nucleotide sequence according to SEQ ID NO: 412 and the antisense strand comprises a modified nucleotide sequence according to SEQ ID NO: 220;
[0806] (uuuuu) the sense strand comprises a modified nucleotide sequence according to SEQ ID NO: 413 and the antisense strand comprises a modified nucleotide sequence according to SEQ ID NO: 221;
[0807] (vvvvv) the sense strand comprises a modified nucleotide sequence according to SEQ ID NO: 414 and the antisense strand comprises a modified nucleotide sequence according to SEQ ID NO: 222;
[0808] (wwwww) the sense strand comprises a modified nucleotide sequence according to SEQ ID NO: 415 and the antisense strand comprises a modified nucleotide sequence according to SEQ ID NO: 223;
[0809] (xxxxx) the sense strand comprises a modified nucleotide sequence according to SEQ ID NO: 416 and the antisense strand comprises a modified nucleotide sequence according to SEQ ID NO: 224;
[0810] (yyyyy) the sense strand comprises a modified nucleotide sequence according to SEQ ID NO: 417 and the antisense strand comprises a modified nucleotide sequence according to SEQ ID NO: 225;
[0811] (zzzzz) the sense strand comprises a modified nucleotide sequence according to SEQ ID NO: 418 and the antisense strand comprises a modified nucleotide sequence according to SEQ ID NO: 226;
[0812] (aaaaaa) the sense strand comprises a modified nucleotide sequence according to SEQ ID NO: 419 and the antisense strand comprises a modified nucleotide sequence according to SEQ ID NO: 227;
[0813] (bbbbbb) the sense strand comprises a modified nucleotide sequence according to SEQ ID NO: 420 and the antisense strand comprises a modified nucleotide sequence according to SEQ ID NO: 228;
[0814] (cccccc) the sense strand comprises a modified nucleotide sequence according to SEQ ID NO: 421 and the antisense strand comprises a modified nucleotide sequence according to SEQ ID NO: 229;
[0815] (dddddd) the sense strand comprises a modified nucleotide sequence according to SEQ ID NO: 422 and the antisense strand comprises a modified nucleotide sequence according to SEQ ID NO: 230;
[0816] (eeeeee) the sense strand comprises a modified nucleotide sequence according to SEQ ID NO: 423 and the antisense strand comprises a modified nucleotide sequence according to SEQ ID NO: 231;
[0817] (ffffff) the sense strand comprises a modified nucleotide sequence according to SEQ ID NO: 424 and the antisense strand comprises a modified nucleotide sequence according to SEQ ID NO: 232;
[0818] (gggggg) the sense strand comprises a modified nucleotide sequence according to SEQ ID NO: 425 and the antisense strand comprises a modified nucleotide sequence according to SEQ ID NO: 233;
[0819] (hhhhhh) the sense strand comprises a modified nucleotide sequence according to SEQ ID NO: 426 and the antisense strand comprises a modified nucleotide sequence according to SEQ ID NO: 234;
[0820] (iiiiii) the sense strand comprises a modified nucleotide sequence according to SEQ ID NO: 427 and the antisense strand comprises a modified nucleotide sequence according to SEQ ID NO: 235;
[0821] (jjjjjj) the sense strand comprises a modified nucleotide sequence according to SEQ ID NO: 428 and the antisense strand comprises a modified nucleotide sequence according to SEQ ID NO: 236;
[0822] (kkkkkk) the sense strand comprises a modified nucleotide sequence according to SEQ ID NO: 429 and the antisense strand comprises a modified nucleotide sequence according to SEQ ID NO: 237;
[0823] (llllll) the sense strand comprises a modified nucleotide sequence according to SEQ ID NO: 430 and the antisense strand comprises a modified nucleotide sequence according to SEQ ID NO: 238;
[0824] (mmmmmm) the sense strand comprises a modified nucleotide sequence according to SEQ ID NO: 431 and the antisense strand comprises a modified nucleotide sequence according to SEQ ID NO: 239;
[0825] (nnnnnn) the sense strand comprises a modified nucleotide sequence according to SEQ ID NO: 432 and the antisense strand comprises a modified nucleotide sequence according to SEQ ID NO: 240;
[0826] (oooooo) the sense strand comprises a modified nucleotide sequence according to SEQ ID NO: 433 and the antisense strand comprises a modified nucleotide sequence according to SEQ ID NO: 241;
[0827] (pppppp) the sense strand comprises a modified nucleotide sequence according to SEQ ID NO: 434 and the antisense strand comprises a modified nucleotide sequence according to SEQ ID NO: 242;
[0828] (qqqqqq) the sense strand comprises a modified nucleotide sequence according to SEQ ID NO: 435 and the antisense strand comprises a modified nucleotide sequence according to SEQ ID NO: 243;
[0829] (rrrrrr) the sense strand comprises a modified nucleotide sequence according to SEQ ID NO: 436 and the antisense strand comprises a modified nucleotide sequence according to SEQ ID NO: 244;
[0830] (ssssss) the sense strand comprises a modified nucleotide sequence according to SEQ ID NO: 437 and the antisense strand comprises a modified nucleotide sequence according to SEQ ID NO: 245;
[0831] (tttttt) the sense strand comprises a modified nucleotide sequence according to SEQ ID NO: 438 and the antisense strand comprises a modified nucleotide sequence according to SEQ ID NO: 246;
[0832] (uuuuuu) the sense strand comprises a modified nucleotide sequence according to SEQ ID NO: 439 and the antisense strand comprises a modified nucleotide sequence according to SEQ ID NO: 247;
[0833] (vvvvvv) the sense strand comprises a modified nucleotide sequence according to SEQ ID NO: 440 and the antisense strand comprises a modified nucleotide sequence according to SEQ ID NO: 248;
[0834] (wwwwww) the sense strand comprises a modified nucleotide sequence according to SEQ ID NO: 441 and the antisense strand comprises a modified nucleotide sequence according to SEQ ID NO: 249;
[0835] (xxxxxx) the sense strand comprises a modified nucleotide sequence according to SEQ ID NO: 442 and the antisense strand comprises a modified nucleotide sequence according to SEQ ID NO: 250;
[0836] (yyyyyy) the sense strand comprises a modified nucleotide sequence according to SEQ ID NO: 443 and the antisense strand comprises a modified nucleotide sequence according to SEQ ID NO: 251;
[0837] (zzzzzz) the sense strand comprises a modified nucleotide sequence according to SEQ ID NO: 444 and the antisense strand comprises a modified nucleotide sequence according to SEQ ID NO: 252;
[0838] (aaaaaaa) the sense strand comprises a modified nucleotide sequence according to SEQ ID NO: 445 and the antisense strand comprises a modified nucleotide sequence according to SEQ ID NO: 253;
[0839] (bbbbbbb) the sense strand comprises a modified nucleotide sequence according to SEQ ID NO: 446 and the antisense strand comprises a modified nucleotide sequence according to SEQ ID NO: 254;
[0840] (ccccccc) the sense strand comprises a modified nucleotide sequence according to SEQ ID NO: 447 and the antisense strand comprises a modified nucleotide sequence according to SEQ ID NO: 255;
[0841] (ddddddd) the sense strand comprises a modified nucleotide sequence according to SEQ ID NO: 448 and the antisense strand comprises a modified nucleotide sequence according to SEQ ID NO: 256;
[0842] (eeeeeee) the sense strand comprises a modified nucleotide sequence according to SEQ ID NO: 449 and the antisense strand comprises a modified nucleotide sequence according to SEQ ID NO: 257;
[0843] (fffffff) the sense strand comprises a modified nucleotide sequence according to SEQ ID NO: 450 and the antisense strand comprises a modified nucleotide sequence according to SEQ ID NO: 258;
[0844] (ggggggg) the sense strand comprises a modified nucleotide sequence according to SEQ ID NO: 451 and the antisense strand comprises a modified nucleotide sequence according to SEQ ID NO: 259;
[0845] (hhhhhhh) the sense strand comprises a modified nucleotide sequence according to SEQ ID NO: 452 and the antisense strand comprises a modified nucleotide sequence according to SEQ ID NO: 260;
[0846] (iiiiii) the sense strand comprises a modified nucleotide sequence according to SEQ ID NO: 453 and the antisense strand comprises a modified nucleotide sequence according to SEQ ID NO: 261;
[0847] (jjjjjjj) the sense strand comprises a modified nucleotide sequence according to SEQ ID NO: 454 and the antisense strand comprises a modified nucleotide sequence according to SEQ ID NO: 262;
[0848] (kkkkkkk) the sense strand comprises a modified nucleotide sequence according to SEQ ID NO: 455 and the antisense strand comprises a modified nucleotide sequence according to SEQ ID NO: 263;
[0849] (lllllll) the sense strand comprises a modified nucleotide sequence according to SEQ ID NO: 456 and the antisense strand comprises a modified nucleotide sequence according to SEQ ID NO: 264;
[0850] (mmmmmmm) the sense strand comprises a modified nucleotide sequence according to SEQ ID NO: 457 and the antisense strand comprises a modified nucleotide sequence according to SEQ ID NO: 265;
[0851] (nnnnnnn) the sense strand comprises a modified nucleotide sequence according to SEQ ID NO: 458 and the antisense strand comprises a modified nucleotide sequence according to SEQ ID NO: 266;
[0852] (ooooooo) the sense strand comprises a modified nucleotide sequence according to SEQ ID NO: 459 and the antisense strand comprises a modified nucleotide sequence according to SEQ ID NO: 267;
[0853] (ppppppp) the sense strand comprises a modified nucleotide sequence according to SEQ ID NO: 460 and the antisense strand comprises a modified nucleotide sequence according to SEQ ID NO: 268;
[0854] (qqqqqqq) the sense strand comprises a modified nucleotide sequence according to SEQ ID NO: 461 and the antisense strand comprises a modified nucleotide sequence according to SEQ ID NO: 269;
[0855] (rrrrrrrr) the sense strand comprises a modified nucleotide sequence according to SEQ ID NO: 462 and the antisense strand comprises a modified nucleotide sequence according to SEQ ID NO: 270;
[0856] (sssssss) the sense strand comprises a modified nucleotide sequence according to SEQ ID NO: 463 and the antisense strand comprises a modified nucleotide sequence according to SEQ ID NO: 271;
[0857] (ttttttt) the sense strand comprises a modified nucleotide sequence according to SEQ ID NO: 464 and the antisense strand comprises a modified nucleotide sequence according to SEQ ID NO: 272;
[0858] (uuuuuuu) the sense strand comprises a modified nucleotide sequence according to SEQ ID NO: 465 and the antisense strand comprises a modified nucleotide sequence according to SEQ ID NO: 273;
[0859] (vvvvvvv) the sense strand comprises a modified nucleotide sequence according to SEQ ID NO: 466 and the antisense strand comprises a modified nucleotide sequence according to SEQ ID NO: 274;
[0860] (wwwwwww) the sense strand comprises a modified nucleotide sequence according to SEQ ID NO: 467 and the antisense strand comprises a modified nucleotide sequence according to SEQ ID NO: 275;
[0861] (xxxxxxx) the sense strand comprises a modified nucleotide sequence according to SEQ ID NO: 468 and the antisense strand comprises a modified nucleotide sequence according to SEQ ID NO: 276;
[0862] (yyyyyyy) the sense strand comprises a modified nucleotide sequence according to SEQ ID NO: 469 and the antisense strand comprises a modified nucleotide sequence according to SEQ ID NO: 277;
[0863] (zzzzzzz) the sense strand comprises a modified nucleotide sequence according to SEQ ID NO: 470 and the antisense strand comprises a modified nucleotide sequence according to SEQ ID NO: 278;
[0864] (aaaaaaaa) the sense strand comprises a modified nucleotide sequence according to SEQ ID NO: 471 and the antisense strand comprises a modified nucleotide sequence according to SEQ ID NO: 279;
[0865] (bbbbbbbb) the sense strand comprises a modified nucleotide sequence according to SEQ ID NO: 472 and the antisense strand comprises a modified nucleotide sequence according to SEQ ID NO: 280;
[0866] (cccccccc) the sense strand comprises a modified nucleotide sequence according to SEQ ID NO: 473 and the antisense strand comprises a modified nucleotide sequence according to SEQ ID NO: 281;
[0867] (dddddddd) the sense strand comprises a modified nucleotide sequence according to SEQ ID NO: 474 and the antisense strand comprises a modified nucleotide sequence according to SEQ ID NO: 282;
[0868] (eeeeeeee) the sense strand comprises a modified nucleotide sequence according to SEQ ID NO: 475 and the antisense strand comprises a modified nucleotide sequence according to SEQ ID NO: 283;
[0869] (ffffffff) the sense strand comprises a modified nucleotide sequence according to SEQ ID NO: 476 and the antisense strand comprises a modified nucleotide sequence according to SEQ ID NO: 284;
[0870] (gggggggg) the sense strand comprises a modified nucleotide sequence according to SEQ ID NO: 477 and the antisense strand comprises a modified nucleotide sequence according to SEQ ID NO: 285;
[0871] (hhhhhhhh) the sense strand comprises a modified nucleotide sequence according to SEQ ID NO: 478 and the antisense strand comprises a modified nucleotide sequence according to SEQ ID NO: 286;
[0872] (iiiiiii) the sense strand comprises a modified nucleotide sequence according to SEQ ID NO: 479 and the antisense strand comprises a modified nucleotide sequence according to SEQ ID NO: 287; or
[0873] (jjjjjjjj) the sense strand comprises a modified nucleotide sequence according to SEQ ID NO: 480 and the antisense strand comprises a modified nucleotide sequence according to SEQ ID NO: 288.

[0874] In some implementations, (a) the sense strand comprises a modified nucleobase sequence according to SEQ ID NO: 296 and the antisense strand comprises a modified nucleobase sequence according to SEQ ID NO: 200;
[0875] (b) the sense strand comprises a modified nucleobase sequence according to SEQ ID NO: 299 and the antisense strand comprises a modified nucleobase sequence according to SEQ ID NO: 203;
[0876] (c) the sense strand comprises a modified nucleobase sequence according to SEQ ID NO: 302 and the antisense strand comprises a modified nucleobase sequence according to SEQ ID NO: 206;
[0877] (d) the sense strand comprises a modified nucleobase sequence according to SEQ ID NO: 304 and the antisense strand comprises a modified nucleobase sequence according to SEQ ID NO: 208;
[0878] (e) the sense strand comprises a modified nucleobase sequence according to SEQ ID NO: 323 and the antisense strand comprises a modified nucleobase sequence according to SEQ ID NO: 227;
[0879] (f) the sense strand comprises a modified nucleobase sequence according to SEQ ID NO: 324 and the antisense strand comprises a modified nucleobase sequence according to SEQ ID NO: 228;
[0880] (g) the sense strand comprises a modified nucleobase sequence according to SEQ ID NO: 326 and the antisense strand comprises a modified nucleobase sequence according to SEQ ID NO: 230;
[0881] (h) the sense strand comprises a modified nucleobase sequence according to SEQ ID NO: 327 and the antisense strand comprises a modified nucleobase sequence according to SEQ ID NO: 231;
[0882] (i) the sense strand comprises a modified nucleobase sequence according to SEQ ID NO: 329 and the antisense strand comprises a modified nucleobase sequence according to SEQ ID NO: 233;
[0883] (j) the sense strand comprises a modified nucleobase sequence according to SEQ ID NO: 330 and the antisense strand comprises a modified nucleobase sequence according to SEQ ID NO: 234;
[0884] (k) the sense strand comprises a modified nucleobase sequence according to SEQ ID NO: 340 and the antisense strand comprises a modified nucleobase sequence according to SEQ ID NO: 244;
[0885] (l) the sense strand comprises a modified nucleobase sequence according to SEQ ID NO: 365 and the antisense strand comprises a modified nucleobase sequence according to SEQ ID NO: 269;
[0886] (m) the sense strand comprises a modified nucleobase sequence according to SEQ ID NO: 372 and the antisense strand comprises a modified nucleobase sequence according to SEQ ID NO: 276;
[0887] (n) the sense strand comprises a modified nucleobase sequence according to SEQ ID NO: 374 and the antisense strand comprises a modified nucleobase sequence according to SEQ ID NO: 278;
[0888] (o) the sense strand comprises a modified nucleobase sequence according to SEQ ID NO: 375 and the antisense strand comprises a modified nucleobase sequence according to SEQ ID NO: 279;
[0889] (p) the sense strand comprises a modified nucleobase sequence according to SEQ ID NO: 376 and the antisense strand comprises a modified nucleobase sequence according to SEQ ID NO: 280;
[0890] (q) the sense strand comprises a modified nucleobase sequence according to SEQ ID NO: 377 and the antisense strand comprises a modified nucleobase sequence according to SEQ ID NO: 281;
[0891] (r) the sense strand comprises a modified nucleobase sequence according to SEQ ID NO: 378 and the antisense strand comprises a modified nucleobase sequence according to SEQ ID NO: 282;
[0892] (s) the sense strand comprises a modified nucleobase sequence according to SEQ ID NO: 381 and the antisense strand comprises a modified nucleobase sequence according to SEQ ID NO: 285;
[0893] (t) the sense strand comprises a modified nucleobase sequence according to SEQ ID NO: 392 and the antisense strand comprises a modified nucleobase sequence according to SEQ ID NO: 200;
[0894] (u) the sense strand comprises a modified nucleobase sequence according to SEQ ID NO: 395 and the antisense strand comprises a modified nucleobase sequence according to SEQ ID NO: 203;
[0895] (v) the sense strand comprises a modified nucleobase sequence according to SEQ ID NO: 398 and the antisense strand comprises a modified nucleobase sequence according to SEQ ID NO: 206;
[0896] (w) the sense strand comprises a modified nucleobase sequence according to SEQ ID NO: 400 and the antisense strand comprises a modified nucleobase sequence according to SEQ ID NO: 208;
[0897] (x) the sense strand comprises a modified nucleobase sequence according to SEQ ID NO: 419 and the antisense strand comprises a modified nucleobase sequence according to SEQ ID NO: 227;
[0898] (y) the sense strand comprises a modified nucleobase sequence according to SEQ ID NO: 420 and the antisense strand comprises a modified nucleobase sequence according to SEQ ID NO: 228;
[0899] (z) the sense strand comprises a modified nucleobase sequence according to SEQ ID NO: 422 and the antisense strand comprises a modified nucleobase sequence according to SEQ ID NO: 230;
[0900] (aa) the sense strand comprises a modified nucleobase sequence according to SEQ ID NO: 423 and the antisense strand comprises a modified nucleobase sequence according to SEQ ID NO: 231;
[0901] (bb) the sense strand comprises a modified nucleobase sequence according to SEQ ID NO: 425 and the antisense strand comprises a modified nucleobase sequence according to SEQ ID NO: 233;
[0902] (cc) the sense strand comprises a modified nucleobase sequence according to SEQ ID NO: 426 and the antisense strand comprises a modified nucleobase sequence according to SEQ ID NO: 234;
[0903] (dd) the sense strand comprises a modified nucleobase sequence according to SEQ ID NO: 436 and the antisense strand comprises a modified nucleobase sequence according to SEQ ID NO: 244;
[0904] (ee) the sense strand comprises a modified nucleobase sequence according to SEQ ID NO: 461 and the antisense strand comprises a modified nucleobase sequence according to SEQ ID NO: 269;
[0905] (ff) the sense strand comprises a modified nucleobase sequence according to SEQ ID NO: 468 and the antisense strand comprises a modified nucleobase sequence according to SEQ ID NO: 276;
[0906] (gg) the sense strand comprises a modified nucleobase sequence according to SEQ ID NO: 470 and the antisense strand comprises a modified nucleobase sequence according to SEQ ID NO: 278;
[0907] (hh) the sense strand comprises a modified nucleobase sequence according to SEQ ID NO: 471 and the antisense strand comprises a modified nucleobase sequence according to SEQ ID NO: 279;
[0908] (ii) the sense strand comprises a modified nucleobase sequence according to SEQ ID NO: 472 and the antisense strand comprises a modified nucleobase sequence according to SEQ ID NO: 280;
[0909] (jj) the sense strand comprises a modified nucleobase sequence according to SEQ ID NO: 473 and the antisense strand comprises a modified nucleobase sequence according to SEQ ID NO: 281;
[0910] (kk) the sense strand comprises a modified nucleobase sequence according to SEQ ID NO: 474 and the antisense strand comprises a modified nucleobase sequence according to SEQ ID NO: 282; or
[0911] (ll) the sense strand comprises a modified nucleobase sequence according to SEQ ID NO: 477 and the antisense strand comprises a modified nucleobase sequence according to SEQ ID NO: 285.

[0912] In some implementations, the RNAi agent comprises a targeting ligand comprising a structure according to Formula I:

[chemical structure]

[0913] wherein R is a linker conjugated to the wherein the targeting ligand is conjugated to the 3′ end of the sense strand, wherein R comprises a structure according to Formula III:

[chemical structure]

[0914] and wherein connection point C of Formula III is conjugated to Formula I, and connection point D of Formula III is conjugated to the 3′ end of the sense strand.

[0915] In some implementations, the sense strand comprises a 3′ overhang of 1-5 nucleotides in length. In some implementations, the sense strand comprises a 5′ overhang of 1-5 nucleotides in length. In some implementations, the antisense strand comprises a 3′ overhang of 1-5 nucleotides in length. In some implementations, the antisense strand comprises a 5′ overhang of 1-5 nucleotides in length. In some implementations, the sense strand or the antisense strand comprises at least one modified nucleotide or at least one modified internucleoside linkage. In some implementations, the sense strand and or the antisense strand comprises a modified internucleoside linkage at a first, second, penultimate, or final internucleoside linkage position.

[0916] In some implementations, the at least one modified nucleotide or at least one modified internucleoside linkage comprises a 2′-O-methyl modified nucleotide, a nucleotide comprising a 5′-phosphorothioate group, a 2′-deoxy-2′-fluoro modified nucleotide, a 2′-deoxy-modified nucleotide, a locked nucleotide, an abasic nucleotide, deoxythymidine, an inverted deoxythymidine, a 2′-amino-modified nucleotide, a 2′-alkyl-modified nucleotide, a morpholino nucleotide, a phosphoramidate, or a non-natural base comprising nucleotide.

[0917] In some implementations, the targeting ligand is conjugated to the sense strand. In some implementations, the targeting ligand is conjugated to the 3′ end of the sense strand. In some implementations, the targeting ligand is conjugated to the 5′ end of the sense strand. In some implementations, the targeting ligand is conjugated to the antisense strand. In some implementations, the targeting ligand is conjugated to the 3′ end of the antisense strand. In some implementations, the targeting ligand is conjugated to the 5′ end of the antisense strand.

[0918] In some implementations, the targeting ligand comprises a galactose trimer. In some implementations, the targeting ligand comprises N-acetylgalactosamine (GalNAc). In some implementations, the targeting ligand comprises a structure according to Formula I:

[chemical structure]

wherein R is:
[0919] (i) the sense strand or the antisense strand; or
[0920] (ii) a linker conjugated to the sense strand or the antisense strand.

[0921] In some implementations, R is a linker conjugated to the sense strand or the antisense strand having a structure according to Formula III:

[chemical structure]

wherein:
[0922] (i) connection point C of Formula III is conjugated to Formula I, and connection point D of Formula III is conjugated to the sense strand or the antisense strand; or
[0923] (ii) connection point C of Formula III is conjugated to Formula I, and connection point D of Formula III is conjugated to a phosphate group which is conjugated to the sense strand or the antisense strand.

[0924] In some implementations, Formula III or the phosphate group is conjugated to the 3′ end or the 5′ end of the sense strand or the antisense strand. In some implementations, Formula III or the phosphate group is conjugated to an internal nucleotide or nucleoside base of the sense strand or the antisense strand. In some implementations, the RNAi agent comprises a targeting ligand and linker according to Formula V:

[chemical structure]

[0925] In some implementations, the RNAi agent is an siRNA molecule. In some implementations, the RNAi agent is an shRNA molecule.

[0926] Described herein is a method of producing the RNAi agent described herein, comprising annealing together the sense strand and the antisense strand. In some implementations, the method comprises synthesizing the antisense strand and/or the sense strand.

### BRIEF DESCRIPTION OF THE DRAWINGS

[0927] FIGS. 1A-1E show dose dependent response curves of exemplary GCK siRNA agents inhibiting GCK mRNA. FIG. 1A shows a dose dependent response curve of exemplary GCK siRNA agents in CaSki cells. FIGS. 1B and 1C show dose dependent response curves of exemplary GalNAc conjugated-GCK siRNA agents in non-human primate primary hepatocytes (NHPPH). FIGS. 1D and 1E show dose dependent response curves of exemplary GalNAc conjugated-GCK siRNA agents in constitutively expressing GCK HepG2 cells (HepG2-GCK).

[0928] FIGS. 2A and 2B show a percent GCK mRNA expression (FIG. 2A) and a percent GCK protein expression (FIG. 2B) in harvested liver tissue from mice on a high fat diet treated with exemplary GCK siRNA agents as compared to mice on a high fat diet treated with vehicle control (PBS), as described in Example 6.

[0929] FIG. 3 shows the percent change in hepatic triglycerides in mice on a high fat diet treated with exemplary GCK siRNA agents as compared to mice on a high fat diet administered vehicle control, as described in Example 6.

### DETAILED DESCRIPTION

[0930] Provided herein are inhibitory nucleic acids (e.g., RNAi agents) to block gene expression in a highly conserved regulatory mechanism known as RNA interference. In particular, the disclosed RNAi agents inhibit the expression of glucokinase (GCK). RNAi agents comprise short interfering RNA (siRNA) and short hairpin RNA (shRNA). The interfering RNA can be assembled from two separate oligonucleotides, where one strand is the sense strand and the other is the antisense strand, herein the antisense and sense strands are self-complementary; the antisense strand comprises nucleotide sequence that is complementary to a nucleotide sequence in a target nucleic acid molecule or a portion thereof and the sense strand comprises nucleotide sequence corresponding to the target nucleic acid sequence or a portion thereof. In some embodiments, the nucleic acid targeted by the RNAi may produce an unwanted protein wherein its inhibition would result in a therapeutic benefit.

[0931] Glucokinase (GCK) is an enzyme responsible for the conversion of glucose into glucose-6 phosphate. This is the rate-limiting step in glucose metabolism. GCK is found in mammalian cells of the liver, pancreas, gut, and brain. GCK catalyzes the first reaction of the glycolytic pathway and acts as the primary glucose sensor in the body. Activating mutations in glucokinase cause too much insulin secretion (hyperinsulinism), whereas inactivating mutations cause too little insulin release and varying degrees of diabetes (Ashcroft, et al., Trends Endocrinol Metab. 2023 February; 34(2):119-130). Heterozygous mutations in the glucokinase (GCK) gene produce two distinct diseases, MODY type 2 (MODY 2) and persistent hyperinsulinemia of infancy (Capuano M. et al., (2012) PLoS ON E 7(6): e38906.). Targeting GCK may represent a strategy for restoring lipid metabolic balance.

[0932] Provided herein are RNAi agents and compositions designed to target and inhibit the production of GCK expression. Also described herein are methods of using the RNAi agents or compositions thereof in treating or ameliorating metabolic dysfunction-associated steatotic liver disease (MASLD). Also described herein are methods of using the RNAi agents or compositions thereof in treating or ameliorating metabolic dysfunction-associated steatohepatitis (MASH).

### I. DEFINITIONS

[0933] Unless defined otherwise, all terms of art, notations and other technical and scientific terms or terminology used herein are intended to have the same meaning as is commonly understood by one of ordinary skill in the art to which the claimed subject matter pertains. In some cases, terms with commonly understood meanings are defined herein for clarity and/or for ready reference, and the inclusion of such definitions herein should not necessarily be construed to represent a substantial difference over what is generally understood in the art.

[0934] As used herein, the singular forms “a,” “an,” and “the” include plural referents unless the context clearly dictates otherwise. For example, “a” or “an” means “at least one” or “one or more.” It is understood that aspects, embodiments, and variations described herein include “comprising,” “consisting,” and/or “consisting essentially of” aspects, embodiments and variations.

[0935] The term “about” as used herein refers to the usual error range for the respective value readily known to the skilled person in this technical field. Reference to “about” a value or parameter herein includes (and describes) embodiments that are directed to that value or parameter per se. For example, description referring to “about X” includes description of “X”.

[0936] It is understood that aspects and variations of the invention described herein encompass “comprising,” “consisting,” and/or “consisting essentially of” aspects and variations. The term “including” encompasses “comprising,” “consisting,” and “consisting essentially of” unless otherwise specified.

[0937] The term “controlling” as used herein, in reference to a liver fat accumulation in a subject, is understood to mean reducing an increase in an amount of liver fat accumulation compared to an untreated subject. Controlling can include preventing an increase in an amount of liver fat.

[0938] As used herein, the term “nucleic acid” refers to a polymer or oligomer of nucleotides. Nucleic acids are also referred as “ribonucleic acids” when the sugar moiety of the nucleotides is D-ribose and as “deoxyribonucleic acids” when the sugar moiety is 2-deoxy-D-ribose.

[0939] As used herein, the term “nucleotide” usually refers to a compound consisting of a nucleoside esterified to a monophosphate, polyphosphate, or phosphate-derivative group via the hydroxyl group of the 5-carbon of the sugar moiety. Nucleotides are also referred as “ribonucleotides” when the sugar moiety is D-ribose and as “deoxyribonucleotides” when the sugar moiety is 2-deoxy-D-ribose.

[0940] As used herein, the term “nucleoside” refers to a glycosylamine consisting of a nucleobase, such as a purine or pyrimidine, usually linked to a 5-carbon sugar (e.g. D-ribose or 2-deoxy-D-ribose) via a β-glycosidic linkage. Nucleosides are also referred as “ribonucleosides” when the sugar moiety is D-ribose and as “deoxyribonucleosides” when the sugar moiety is 2-deoxy-D-ribose.

[0941] As used herein, the term “nucleobase”, refers to a compound containing a nitrogen atom that has the chemical properties of a base. N on-limiting examples of nucleobases are compounds comprising pyridine, purine, or pyrimidine moieties, including, but not limited to adenine, guanine, hypoxanthine, thymine, cytosine, and uracil.

[0942] As used herein, the term “nucleotide sequences” encompasses nucleotide sequences with no modified nucleotides and nucleotide sequences with modified nucleotides. The latter are referred to as “modified nucleotide sequences” or simply “modified sequences.”

[0943] As used herein, the term “modified nucleotide” is a nucleotide other than a ribonucleotide (2′-hydroxyl nucleotide).

[0944] As used herein, the following notations are used to indicate modified nucleotides, targeting groups, and linking groups. As the person of ordinary skill in the art would readily understand, unless otherwise indicated by the sequence, that when present in an oligonucleotide, the monomers are mutually linked by 5′-3′-phosphodiester bonds:
[0945] A=adenosine-3′-phosphate;
[0946] C=cytidine-3′-phosphate;
[0947] G=guanosine-3′-phosphate;
[0948] U=uridine-3′-phosphate
[0949] n=any 2′-OMe modified nucleotide
[0950] a=2′-O-methyladenosine-3′-phosphate
[0951] as=2′-O-methyladenosine-3′-phosphorothioate
[0952] c=2′-O-methylcytidine-3′-phosphate
[0953] cs=2′-O-methylcytidine-3′-phosphorothioate
[0954] g=2′-O-methylguanosine-3′-phosphate
[0955] gs=2′-O-methylguanosine-3′-phosphorothioate
[0956] t=2′-O-methyl-5-methyluridine-3′-phosphate
[0957] ts=2′-O-methyl-5-methyluridine-3′-phosphorothioate
[0958] u=2′-O-methyluridine-3′-phosphate
[0959] us=2′-O-methyluridine-3′-phosphorothioate
[0960] Nf=any 2′-fluoro modified nucleotide
[0961] Nfs=any 2′-fluoro modified nucleotide with 3′-phosporothioate
[0962] Af=2′-fluoroadenosine-3′-phosphate
[0963] Afs=2′-fluoroadenosine-3′-phosporothioate
[0964] Cf=2′-fluorocytidine-3′-phosphate
[0965] Cfs=2′-fluorocytidine-3′-phosphorothioate
[0966] Gf=2′-fluoroguanosine-3′-phosphate
[0967] Gfs=2′-fluoroguanosine-3′-phosphorothioate
[0968] Tf=2′-fluoro-5′-methyluridine-3′-phosphate
[0969] Tfs=2′-fluoro-5′-methyluridine-3′-phosphorothioate
[0970] Uf=2′-fluorouridine-3′-phosphate
[0971] Ufs=2′-fluorouridine-3′-phosphorothioate
[0972] dN=any 2′-deoxyribonucleotide
[0973] dT=2′-deoxythymidine-3′-phosphate
[0974] NUNA=2′, 3′-seco nucleotide mimics (unlocked nucleobase analogs)
[0975] NLNA=locked nucleotide
[0976] NfANA=2′-F-Arabino nucleotide
[0977] NM=2′-methoxyethyl nucleotide
[0978] AM=2′-methoxyethyladenosine-3′-phosphate
[0979] AMs=2′-methoxyethyladenosine-3′-phosphorothioate
[0980] TM=2′-methoxyethylthymidine-3′-phosphate
[0981] TMs=2′-methoxyethylthymidine-3′-phosphorothioate
[0982] R=ribitol
[0983] (invdN)=any inverted deoxyribonucleotide (3′-3′ linked nucleotide)
[0984] (invAb)=inverted (3′-3′ linked) abasic deoxyribonucleotide, see Table 4
[0985] (invAb)s=inverted (3′-3′ linked) abasic deoxyribonucleotide-5′-phosphorothioate, see Table 4
[0986] (invn)=any inverted 2′-OMe nucleotide (3′-3′ linked nucleotide)
[0987] s=phosphorothioate linkage
[0988] vpdN=vinyl phosphonate deoxyribonucleotide
[0989] (5Me-Nf)=5′-Me, 2′-fluoro nucleotide
[0990] cPrp=cyclopropyl phosphonate, see Table 4
[0991] epTcPr=see Table 4
[0992] epTM=see Table 4

[0993] As used herein, an “RNAi agent” means a composition that contains an RNA or RNA-like (e.g., chemically modified RNA) oligonucleotide molecule that is capable of degrading or inhibiting translation of messenger RNA (mRNA) transcripts of a target mRNA in a sequence specific manner. As used herein, RNAi agents may operate through the RNA interference mechanism (i.e., inducing RNA interference through interaction with the RNA interference pathway machinery (RNA-induced silencing complex or RISC) of mammalian cells), or by any alternative mechanism(s) or pathway(s). While it is believed that RNAi agents, as that term is used herein, operate primarily through the RNA interference mechanism, the disclosed RNAi agents are not bound by or limited to any particular pathway or mechanism of action. RNAi agents disclosed herein are comprised of a sense strand and an antisense strand, and include, but are not limited to: short interfering RNAs (siRNAs), double-stranded RNAs (dsRNA), micro RNAs (miRNAs), short hairpin RNAs (shRNA), and dicer substrates. The antisense strand of the RNAi agents described herein is at least partially complementary to the mRNA being targeted.

[0994] As used herein, and unless otherwise indicated, the term “complementary,” when used to describe a first nucleotide sequence (e.g., RNAi agent sense strand or targeted mRNA) in relation to a second nucleotide sequence (e.g., RNAi agent antisense strand or a single-stranded antisense oligonucleotide), means the ability of an oligonucleotide or polynucleotide including the first nucleotide sequence to hybridize (form base pair hydrogen bonds under mammalian physiological conditions (or similar conditions in vitro)) and form a duplex or double helical structure under certain conditions with an oligonucleotide or polynucleotide including the second nucleotide sequence. Complementary sequences include Watson-Crick base pairs or non-Watson-Crick base pairs and include natural or modified nucleotides or nucleotide mimics, at least to the extent that the above hybridization requirements are fulfilled. Sequence identity or complementarity is independent of modification. For example, a and Af are complementary to U (or T) and identical to A for the purposes of determining identity or complementarity.

[0995] As used herein, “partially complementary” means that in a hybridized pair of nucleobase sequences, at least 70%, but not all, of the bases in a contiguous sequence of a first polynucleotide will hybridize with the same number of bases in a contiguous sequence of a second polynucleotide.

[0996] As used herein, “treatment” (and grammatical variations thereof such as “treat” or “treating”) refers to complete or partial amelioration or reduction of a disease or condition or disorder, or a symptom, adverse effect or outcome, or phenotype associated therewith. Desirable effects of treatment include, but are not limited to, preventing recurrence of disease, alleviation of symptoms, diminishment of any direct or indirect pathological consequences of the disease, decreasing the rate of disease progression, amelioration or palliation of the disease state, and remission or improved prognosis. The terms do not require complete curing of a disease or complete elimination of any symptom or effect(s) on all symptoms or outcomes.

[0997] As used herein, “delaying development of a disease” means to defer, hinder, slow, retard, stabilize, suppress and/or postpone development of the disease (such as metabolic dysfunction-associated steatotic liver disease (MASLD) and/or metabolic dysfunction-associated steatohepatitis (MASH)). This delay can be of varying lengths of time, depending on the history of the disease and/or subject being treated. As sufficient or significant delay can, in effect, encompass prevention, in that the subject does not develop the disease.

[0998] “Preventing,” as used herein, includes providing prophylaxis with respect to the occurrence or recurrence of a disease in a subject that may be predisposed to the disease but has not yet been diagnosed with the disease. In some embodiments, the provided RNAi agent and compositions are used to delay development of a disease or to slow the progression of a disease.

[0999] An “effective amount” of an agent, e.g., a pharmaceutical formulation, RNAi agent, or composition, in the context of administration, refers to an amount effective, at dosages/amounts and for periods of time necessary, to achieve a desired result, such as a therapeutic or prophylactic result.

[1000] A “therapeutically effective amount” of an agent, e.g., a pharmaceutical formulation, RNAi agent, or composition refers to an amount effective, at dosages and for periods of time necessary, to achieve a desired therapeutic result, such as for treatment of a disease, condition, or disorder, and/or pharmacokinetic or pharmacodynamic effect of the treatment. The therapeutically effective amount may vary according to factors such as the disease state, age, sex, and weight of the subject. In some embodiments, the provided methods involve administering the RNAi agent and/or compositions at effective amounts, e.g., therapeutically effective amounts.

[1001] As used herein, a “subject” or an “individual” is a mammal. In some embodiments, a “mammal” includes humans, non-human primates, domestic and farm animals, and zoo, sports, or pet animals, such as dogs, horses, rabbits, cattle, pigs, hamsters, gerbils, mice, ferrets, rats, cats, monkeys, etc. In some embodiments, the subject is human.

[1002] Throughout this disclosure, various aspects of the claimed subject matter are presented in a range format. It should be understood that the description in range format is merely for convenience and brevity and should not be construed as an inflexible limitation on the scope of the claimed subject matter. Accordingly, the description of a range should be considered to have specifically disclosed all the possible sub-ranges as well as individual numerical values within that range. For example, where a range of values is provided, it is understood that each intervening value, between the upper and lower limit of that range and any other stated or intervening value in that stated range is encompassed within the claimed subject matter. The upper and lower limits of these smaller ranges may independently be included in the smaller ranges, and are also encompassed within the claimed subject matter, subject to any specifically excluded limit in the stated range. W here the stated range includes one or both of the limits, ranges excluding either or both of those included limits are also included in the claimed subject matter. This applies regardless of the breadth of the range.

[1003] All publications, including patent documents, scientific articles and databases, referred to in this application are incorporated by reference in their entirety for all purposes to the same extent as if each individual publication were individually incorporated by reference. If a definition set forth herein is contrary to or otherwise inconsistent with a definition set forth in the patents, applications, published applications and other publications that are herein incorporated by reference, the definition set forth herein prevails over the definition that is incorporated herein by reference.

[1004] The section headings used herein are for organizational purposes only and are not to be construed as limiting the subject matter described.

### II. RNAi AGENTS

[1005] Provided herein are inhibitory nucleic acids produced to inhibit the expression of glucokinase (GCK). In some embodiments, the inhibitory nucleic acids described herein include modified oligonucleotides, oligomeric duplexes, antisense oligonucleotides (ASOs), ribozymes, external guide sequence (EGS) oligonucleotides, siRNA compounds, single- or double-stranded RNA interference (RNAi) compounds such as siRNA compounds, modified bases/locked nucleic acids (LNAs), antagomirs, peptide nucleic acids (PNAs), and other oligomeric compounds or oligonucleotide mimetics which hybridize to at least a portion of (GCK) and modulate its function. In some embodiments, the inhibitory nucleic acids include antisense RNA, antisense DNA, chimeric antisense oligonucleotides, antisense oligonucleotides comprising modified linkages, interference RNA (RNAi), short interfering RNA (siRNA); a micro, interfering RNA (miRNA); a small, temporal RNA (stRNA); or a short, hairpin RNA (shRNA); small RNA-induced gene activation (RNAa); small activating RNAs (saRNAs), or combinations thereof. In a specific embodiment, the inhibitory nucleic acid is an interference RNA (RNAi).

[1006] In some embodiments, the inhibitory agent is a modified oligonucleotide. In some embodiments, the modified oligonucleotide consists of 10 to 50 linked nucleosides, 10 to 30 linked nucleosides, 12 to 30 linked nucleosides, 15 to 50 linked nucleosides, 20 to 50 linked nucleosides, or 12 to 50 linked nucleosides. In an exemplary embodiment, the modified oligonucleotide consists of between 12 to 30 or 12 to 50 linked nucleosides. In some embodiments, the modified oligonucleotide includes at least one synthetically modified internucleoside linkage. In some embodiments, the modified oligonucleotide includes at least one synthetically modified sugar-phosphate backbone. In some embodiments, the modified oligonucleotide comprises a nucleobase sequence including at least 12, at least 13, at least 14, at least 15, at least 16, at least 17, at least 18, at least 19, at least 20, at least 21, at least 22, at least 23, at least 24, or at least 25 contiguous nucleobases complementary to an equal length portion of SEQ ID NO: 481 (GCK). In some embodiments, the modified oligonucleotide is a modified antisense strand. In some embodiments, the modified oligonucleotide is conjugated to a targeting ligand that targets a hepatocyte.

[1007] In some embodiments, the inhibitory agent is an oligomeric duplex. In some embodiments, the oligomeric duplex comprises a first modified oligonucleotide and a second modified oligonucleotide. In some embodiments, the first modified oligonucleotide consists of 10 to 50 linked nucleosides, 10 to 30 linked nucleosides, 12 to 30 linked nucleosides, 15 to 50 linked nucleosides, 20 to 50 linked nucleosides, or 12 to 50 linked nucleosides. In an exemplary embodiment, the first modified oligonucleotide consists of between 12 to 30 or 12 to 50 linked nucleosides. In some embodiments, the first modified oligonucleotide comprises a nucleobase sequence including at least 12, at least 13, at least 14, at least 15, at least 16, at least 17, at least 18, at least 19, at least 20, at least 21, at least 22, at least 23, at least 24, or at least 25 contiguous nucleobases complementary to an equal length portion of SEQ ID NO: 481 (GCK). In some embodiments, the first modified oligonucleotide is a modified antisense strand. In some embodiments, the second modified oligonucleotide consists of 10 to 50 linked nucleosides, 10 to 30 linked nucleosides, 12 to 30 linked nucleosides, 15 to 50 linked nucleosides, 20 to 50 linked nucleosides, or 12 to 50 linked nucleosides. In an exemplary embodiment, the second modified oligonucleotide consists of between 12 to 30 or 12 to 50 linked nucleosides. In some embodiments, the second modified oligonucleotide comprises a complementary region of at least 8 nucleobases that is at least 90% complementary (e.g., at least 91%, 92%, 93%, 94%, 95%, 96%, 97%, 98%, 99%, or 100% complementary) to the nucleobase sequence of an equal length portion of the first modified oligonucleotide. In some embodiments, the second modified oligonucleotide is a modified sense strand. In some embodiments, the first and/or second modified oligonucleotide is conjugated to a targeting ligand that targets a hepatocyte.

[1008] In some embodiments, the inhibitory agent is an RNAi agent. In some embodiments, the RNAi agent comprises an antisense strand and a sense strand. In some embodiments, the antisense strand of the RNAi agent is 10 to 40, 10 to 30, 13 to 30, or 13 to 26 nucleotides in length. In some embodiments, the antisense strand of the RNAi agent is 10, 11, 12, 13, 14, 15, 16, 17, 18, 19, 20, 21, 22, 23, 24, 25, 26, 27, 28, 29, 30, 31, 32, 33, 34, 35, 36, 37, 38, 39, or 40 nucleotides in length. In various implementations, the length of the antisense strand is in a range between any two numbers selected from 10-40. Namely, the length of the antisense strand is in the range of, e.g., 10-11, 10-12, 10-13, 10-14, 10-15, 10-16, 10-17, 10-18, 10-19, 10-20, 10-21, 10-22, 10-23, 10-24, 10-25, 10-26, 10-27, 10-28, 10-29, 10-30, 10-31, 10-32, 10-33, 10-34, 10-35, 10-36, 10-37, 10-38, 10-39, 10-40, 11-12, 11-13, 11-14, 11-15, 11-16, 11-17, 11-18, 11-19, 11-20, 11-21, 11-22, 11-23, 11-24, 11-25, 11-26, 11-27, 11-28, 11-29, 11-30, 11-31, 11-32, 11-33, 11-34, 11-35, 11-36, 11-37, 11-38, 11-39, 11-40, 12-13, 12-14, 12-15, 12-16, 12-17, 12-18, 12-19, 12-20, 12-21, 12-22, 12-23, 12-24, 12-25, 12-26, 12-27, 12-28, 12-29, 12-30, 12-31, 12-32, 12-33, 12-34, 12-35, 12-36, 12-37, 12-38, 12-39, 12-40, 13-14, 13-15, 13-16, 13-17, 13-18, 13-19, 13-20, 13-21, 13-22, 13-23, 13-24, 13-25, 13-26, 13-27, 13-28, 13-29, 13-30, 13-31, 13-32, 13-33, 13-34, 13-35, 13-36, 13-37, 13-38, 13-39, 13-40, 14-15, 14-16, 14-17, 14-18, 14-19, 14-20, 14-21, 14-22, 14-23, 14-24, 14-25, 14-26, 14-27, 14-28, 14-29, 14-30, 14-31, 14-32, 14-33, 14-34, 14-35, 14-36, 14-37, 14-38, 14-39, 14-40, 15-16, 15-17, 15-18, 15-19, 15-20, 15-21, 15-22, 15-23, 15-24, 15-25, 15-26, 15-27, 15-28, 15-29, 15-30, 15-31, 15-32, 15-33, 15-34, 15-35, 15-36, 15-37, 15-38, 15-39, 15-40, 16-17, 16-18, 16-19, 16-20, 16-21, 16-22, 16-23, 16-24, 16-25, 16-26, 16-27, 16-28, 16-29, 16-30, 16-31, 16-32, 16-33, 16-34, 16-35, 16-36, 16-37, 16-38, 16-39, 16-40, 17-18, 17-19, 17-20, 17-21, 17-22, 17-23, 17-24, 17-25, 17-26, 17-27, 17-28, 17-29, 17-30, 17-31, 17-32, 17-33, 17-34, 17-35, 17-36, 17-37, 17-38, 17-39, 17-40, 18-19, 18-20, 18-21, 18-22, 18-23, 18-24, 18-25, 18-26, 18-27, 18-28, 18-29, 18-30, 18-31, 18-32, 18-33, 18-34, 18-35, 18-36, 18-37, 18-38, 18-39, 18-40, 19-20, 19-21, 19-22, 19-23, 19-24, 19-25, 19-26, 19-27, 19-28, 19-29, 19-30, 19-31, 19-32, 19-33, 19-34, 19-35, 19-36, 19-37, 19-38, 19-39, 19-40, 20-21, 20-22, 20-23, 20-24, 20-25, 20-26, 20-27, 20-28, 20-29, 20-30, 20-31, 20-32, 20-33, 20-34, 20-35, 20-36, 20-37, 20-38, 20-39, 20-40, 21-22, 21-23, 21-24, 21-25, 21-26, 21-27, 21-28, 21-29, 21-30, 21-31, 21-32, 21-33, 21-34, 21-35, 21-36, 21-37, 21-38, 21-39, 21-40, 22-23, 22-24, 22-25, 22-26, 22-27, 22-28, 22-29, 22-30, 22-31, 22-32, 22-33, 22-34, 22-35, 22-36, 22-37, 22-38, 22-39, 22-40, 23-24, 23-25, 23-26, 23-27, 23-28, 23-29, 23-30, 23-31, 23-32, 23-33, 23-34, 23-35, 23-36, 23-37, 23-38, 23-39, 23-40, 24-25, 24-26, 24-27, 24-28, 24-29, 24-30, 24-31, 24-32, 24-33, 24-34, 24-35, 24-36, 24-37, 24-38, 24-39, 24-40, 25-26, 25-27, 25-28, 25-29, 25-30, 25-31, 25-32, 25-33, 25-34, 25-35, 25-36, 25-37, 25-38, 25-39, 25-40, 26-27, 26-28, 26-29, 26-30, 26-31, 26-32, 26-33, 26-34, 26-35, 26-36, 26-37, 26-38, 26-39, 26-40, 27-28, 27-29, 27-30, 27-31, 27-32, 27-33, 27-34, 27-35, 27-36, 27-37, 27-38, 27-39, 27-40, 28-29, 28-30, 28-31, 28-32, 28-33, 28-34, 28-35, 28-36, 28-37, 28-38, 28-39, 28-40, 29-30, 29-31, 29-32, 29-33, 29-34, 29-35, 29-36, 29-37, 29-38, 29-39, 29-40, 30-31, 30-32, 30-33, 30-34, 30-35, 30-36, 30-37, 30-38, 30-39, 30-40, 31-32, 31-33, 31-34, 31-35, 31-36, 31-37, 31-38, 31-39, 31-40, 32-33, 32-34, 32-35, 32-36, 32-37, 32-38, 32-39, 32-40, 33-34, 33-35, 33-36, 33-37, 33-38, 33-39, 33-40, 34-35, 34-36, 34-37, 34-38, 34-39, 34-40, 35-36, 35-37, 35-38, 35-39, 35-40, 36-37, 36-38, 36-39, 36-40, 37-38, 37-39, 37-40, 38-39, 38-40, 39-40 or nucleotides. In some embodiments, the antisense strand of the RNAi agent is between 1 to 10 nucleotides, 5 to 15 nucleotides, 10 to 20 nucleotides, 15-25 nucleotides, 20-30 nucleotides, 25-35 nucleotides, or 30 to 40 nucleotides in length. In a specific embodiment, the antisense strand of the RNAi agent is between 20-25 nucleotides in length.

[1009] In some embodiments, the sense strand of the RNAi agent is 10 to 40, 10 to 30, 13 to 30, or 13 to 26 nucleotides in length. In some embodiments, the sense strand of the RNAi agent is 10, 11, 12, 13, 14, 15, 16, 17, 18, 19, 20, 21, 22, 23, 24, 25, 26, 27, 28, 29, 30, 31, 32, 33, 34, 35, 36, 37, 38, 39, or 40 nucleotides in length. In various implementations, the length of the sense strand is in a range between any two numbers selected from 10-40. Namely, the length of the sense strand is in the range of, e.g., 10-11, 10-12, 10-13, 10-14, 10-15, 10-16, 10-17, 10-18, 10-19, 10-20, 10-21, 10-22, 10-23, 10-24, 10-25, 10-26, 10-27, 10-28, 10-29, 10-30, 10-31, 10-32, 10-33, 10-34, 10-35, 10-36, 10-37, 10-38, 10-39, 10-40, 11-12, 11-13, 11-14, 11-15, 11-16, 11-17, 11-18, 11-19, 11-20, 11-21, 11-22, 11-23, 11-24, 11-25, 11-26, 11-27, 11-28, 11-29, 11-30, 11-31, 11-32, 11-33, 11-34, 11-35, 11-36, 11-37, 11-38, 11-39, 11-40, 12-13, 12-14, 12-15, 12-16, 12-17, 12-18, 12-19, 12-20, 12-21, 12-22, 12-23, 12-24, 12-25, 12-26, 12-27, 12-28, 12-29, 12-30, 12-31, 12-32, 12-33, 12-34, 12-35, 12-36, 12-37, 12-38, 12-39, 12-40, 13-14, 13-15, 13-16, 13-17, 13-18, 13-19, 13-20, 13-21, 13-22, 13-23, 13-24, 13-25, 13-26, 13-27, 13-28, 13-29, 13-30, 13-31, 13-32, 13-33, 13-34, 13-35, 13-36, 13-37, 13-38, 13-39, 13-40, 14-15, 14-16, 14-17, 14-18, 14-19, 14-20, 14-21, 14-22, 14-23, 14-24, 14-25, 14-26, 14-27, 14-28, 14-29, 14-30, 14-31, 14-32, 14-33, 14-34, 14-35, 14-36, 14-37, 14-38, 14-39, 14-40, 15-16, 15-17, 15-18, 15-19, 15-20, 15-21, 15-22, 15-23, 15-24, 15-25, 15-26, 15-27, 15-28, 15-29, 15-30, 15-31, 15-32, 15-33, 15-34, 15-35, 15-36, 15-37, 15-38, 15-39, 15-40, 16-17, 16-18, 16-19, 16-20, 16-21, 16-22, 16-23, 16-24, 16-25, 16-26, 16-27, 16-28, 16-29, 16-30, 16-31, 16-32, 16-33, 16-34, 16-35, 16-36, 16-37, 16-38, 16-39, 16-40, 17-18, 17-19, 17-20, 17-21, 17-22, 17-23, 17-24, 17-25, 17-26, 17-27, 17-28, 17-29, 17-30, 17-31, 17-32, 17-33, 17-34, 17-35, 17-36, 17-37, 17-38, 17-39, 17-40, 18-19, 18-20, 18-21, 18-22, 18-23, 18-24, 18-25, 18-26, 18-27, 18-28, 18-29, 18-30, 18-31, 18-32, 18-33, 18-34, 18-35, 18-36, 18-37, 18-38, 18-39, 18-40, 19-20, 19-21, 19-22, 19-23, 19-24, 19-25, 19-26, 19-27, 19-28, 19-29, 19-30, 19-31, 19-32, 19-33, 19-34, 19-35, 19-36, 19-37, 19-38, 19-39, 19-40, 20-21, 20-22, 20-23, 20-24, 20-25, 20-26, 20-27, 20-28, 20-29, 20-30, 20-31, 20-32, 20-33, 20-34, 20-35, 20-36, 20-37, 20-38, 20-39, 20-40, 21-22, 21-23, 21-24, 21-25, 21-26, 21-27, 21-28, 21-29, 21-30, 21-31, 21-32, 21-33, 21-34, 21-35, 21-36, 21-37, 21-38, 21-39, 21-40, 22-23, 22-24, 22-25, 22-26, 22-27, 22-28, 22-29, 22-30, 22-31, 22-32, 22-33, 22-34, 22-35, 22-36, 22-37, 22-38, 22-39, 22-40, 23-24, 23-25, 23-26, 23-27, 23-28, 23-29, 23-30, 23-31, 23-32, 23-33, 23-34, 23-35, 23-36, 23-37, 23-38, 23-39, 23-40, 24-25, 24-26, 24-27, 24-28, 24-29, 24-30, 24-31, 24-32, 24-33, 24-34, 24-35, 24-36, 24-37, 24-38, 24-39, 24-40, 25-26, 25-27, 25-28, 25-29, 25-30, 25-31, 25-32, 25-33, 25-34, 25-35, 25-36, 25-37, 25-38, 25-39, 25-40, 26-27, 26-28, 26-29, 26-30, 26-31, 26-32, 26-33, 26-34, 26-35, 26-36, 26-37, 26-38, 26-39, 26-40, 27-28, 27-29, 27-30, 27-31, 27-32, 27-33, 27-34, 27-35, 27-36, 27-37, 27-38, 27-39, 27-40, 28-29, 28-30, 28-31, 28-32, 28-33, 28-34, 28-35, 28-36, 28-37, 28-38, 28-39, 28-40, 29-30, 29-31, 29-32, 29-33, 29-34, 29-35, 29-36, 29-37, 29-38, 29-39, 29-40, 30-31, 30-32, 30-33, 30-34, 30-35, 30-36, 30-37, 30-38, 30-39, 30-40, 31-32, 31-33, 31-34, 31-35, 31-36, 31-37, 31-38, 31-39, 31-40, 32-33, 32-34, 32-35, 32-36, 32-37, 32-38, 32-39, 32-40, 33-34, 33-35, 33-36, 33-37, 33-38, 33-39, 33-40, 34-35, 34-36, 34-37, 34-38, 34-39, 34-40, 35-36, 35-37, 35-38, 35-39, 35-40, 36-37, 36-38, 36-39, 36-40, 37-38, 37-39, 37-40, 38-39, 38-40, 39-40 or nucleotides In some embodiments, the sense strand of the RNAi agent is between 1 to 10 nucleotides, 5 to 15 nucleotides, 10 to 20 nucleotides, 15-25 nucleotides, 20-30 nucleotides, 25-35 nucleotides, or 30 to 40 nucleotides in length. In a specific embodiment, the antisense strand of the RNAi agent is between 20-25 nucleotides in length.

[1010] In some embodiments, the RNAi agent comprises an antisense strand with a 3′ overhang of nucleotides. In some embodiments, the antisense strand 3′ overhang is 1, 2, 3, 4, 5, 6, 7, 8, 9, or 10 nucleotides in length. In some embodiments, the antisense strand comprises a 3′ overhang of 1-10 nucleotides in length, 1-9 nucleotides in length, 1-8 nucleotides in length, 1-7 nucleotides in length, 1-6 nucleotides in length, 1-5 nucleotides in length, 1-4 nucleotides in length, 1-3 nucleotides in length, 1 or 2 nucleotides in length, or 1 nucleotide in length. In a specific embodiment, the RNAi agent comprises an antisense strand comprising a 3′ overhang of 1-5 nucleotides in length.

[1011] In some embodiments, the RNAi agent comprises an antisense strand with a 5′ overhang of nucleotides. In some embodiments, the antisense strand 5′ overhang is 1, 2, 3, 4, 5, 6, 7, 8, 9, or 10 nucleotides in length. In some embodiments, the antisense strand comprises a 5′ overhang of 1-10 nucleotides in length, 1-9 nucleotides in length, 1-8 nucleotides in length, 1-7 nucleotides in length, 1-6 nucleotides in length, 1-5 nucleotides in length, 1-4 nucleotides in length, 1-3 nucleotides in length, 1 or 2 nucleotides in length, or 1 nucleotide in length. In a specific embodiment, the RNAi agent comprises an antisense strand comprising a 5′ overhang of 1-5 nucleotides in length.

[1012] In some embodiments, the RNAi agent comprises a sense strand with a 3′ overhang of nucleotides. In some embodiments, the sense strand 3′ overhang is 1, 2, 3, 4, 5, 6, 7, 8, 9, or 10 nucleotides in length. In some embodiments, the sense strand comprises a 3′ overhang of 1-10 nucleotides in length, 1-9 nucleotides in length, 1-8 nucleotides in length, 1-7 nucleotides in length, 1-6 nucleotides in length, 1-5 nucleotides in length, 1-4 nucleotides in length, 1-3 nucleotides in length, 1 or 2 nucleotides in length, or 1 nucleotide in length. In a specific embodiment, the RNAi agent comprises a sense strand comprising a 3′ overhang of 1-5 nucleotides in length.

[1013] In some embodiments, the RNAi agent comprises a sense strand with a 5′ overhang of nucleotides. In some embodiments, the sense strand 5′ overhang is 1, 2, 3, 4, 5, 6, 7, 8, 9, or 10 nucleotides in length. In some embodiments, the sense strand comprises a 5′ overhang of 1-10 nucleotides in length, 1-9 nucleotides in length, 1-8 nucleotides in length, 1-7 nucleotides in length, 1-6 nucleotides in length, 1-5 nucleotides in length, 1-4 nucleotides in length, 1-3 nucleotides in length, 1 or 2 nucleotides in length, or 1 nucleotide in length. In a specific embodiment, the RNAi agent comprises a sense strand comprising a 5′ overhang of 1-5 nucleotides in length.

[1014] In some embodiments, the 3′ overhang of the sense and/or the antisense strand comprises uracil and/or comprises nucleotides complementary to a sequence in a pregenomic RNA and/or mRNA molecule that encodes GCK. In some embodiments, the 5′ overhang of the sense and/or the antisense strand comprises uracil and/or comprises nucleotides complementary to a sequence in a pregenomic RNA and/or mRNA molecule that encodes GCK.

[1015] In some embodiments, the 3′ overhang of the sense and/or the antisense strand comprises uracil and/or comprises nucleotides partially complementary to a sequence in a pregenomic RNA and/or mRNA molecule that encodes GCK. In some embodiments, the 5′ overhang of the sense and/or the antisense strand comprises uracil and/or comprises nucleotides partially complementary to a sequence in a pregenomic RNA and/or mRNA molecule that encodes GCK.

[1016] In some embodiments, the antisense strand of the RNAi agent comprises nucleobases that complement a sequence in an mRNA molecule that encodes GCK. In some embodiments, the mRNA molecule that encodes GCK comprises a nucleobase sequence according to SEQ ID NO: 481. In some embodiments, the antisense strand comprises at least 5, 6, 7, 8, 9, 10, 11, 12, 13, 14, 15, 16, 17, 18, 19, 20, 21, 22, 23, 24, 25, 26, 27, 28, 29, or 30 contiguous bases that complement a sequence in a GCK mRNA molecule. In some embodiments, the antisense strand comprises at least 14 contiguous bases that complement a sequence in an GCK mRNA molecule. In some embodiments, the antisense strand comprises at least 15 contiguous bases that complement a sequence in a GCK mRNA molecule. In some embodiments, the antisense strand comprises at least 16 contiguous bases that complement a sequence in a GCK mRNA molecule. In some embodiments, the antisense strand comprises at least 17 contiguous bases that complement a sequence in a GCK mRNA molecule.

[1017] In some embodiments, the antisense strand of the RNAi agent comprises a uracil nucleobase at the 5′ terminus or the sense strand of the RNAi agent comprises an adenine nucleobase at the 3′ terminus. In some embodiments, the antisense strand of the RNAi agent comprises a uracil nucleobase at the 5′ terminus and the sense strand of the RNAi agent comprises an adenine nucleobase at the 3′ terminus. The addition of an extra uracil nucleobase at the 5′ terminus of the antisense strand and/or an extra adenine nucleobase at the 3′ terminus of the sense strand can optimize performance of the RNAi agent by promoting the correct strand uptake by the RNA-induced silencing complex (RISC), enhancing duplex stability, protecting against degradation, and minimizing off-target effects. These modifications may help ensure that the designed siRNA is efficient and effective in gene silencing. The antisense strand sequences provided herein may comprise an extra uracil nucleobase at the 5′ terminus, and/or the sense strand sequences provided herein may comprise an extra adenine nucleobase at the 3′ terminus. In some embodiments, the antisense strand comprises, in order, nucleotides 1-23 of any one of SEQ ID NOS: 1-96 and 193-288. In some embodiments, the sense strand comprises, nucleotides 1-20 of any one of SEQ ID NOS: 97-192, 289-384, and 385-480.

[1018] In some embodiments, the antisense strand and the sense strand of the RNAi agent are self-complementary (i.e., each strand comprises a nucleotide sequence that is complementary to nucleotide sequence of the other strand) or at least partially complementary. In this instance, the antisense strand and sense strand will form a duplex (i.e., double stranded structure) that does not comprise overhangs. In some embodiments, the RNAi agent comprises a duplex structure. In some embodiments, the RNAi agent comprises a duplex length of at least 5, 6, 7, 8, 9, 10, 11, 12, 13, 14, 15, 16, 17, 18, 19, 20, 21, 22, 23, 24, 25, 26, 27, 28, 29, 30, 31, 32, 33, 34, 35, 36, 37, 38, 39, or 40 nucleotides long. In some embodiments, the RNAi agent comprises a duplex of between 5 to 25 nucleotides long, 10 to 30 nucleotides long, 15 to 35 nucleotides long, 20 to 40 nucleotides long, 10 to 20 nucleotides long, 15 to 25 nucleotides long, 20 to 30 nucleotides long, 25 to 35 nucleotides long, 30 to 40 nucleotides long, 5 to 20 nucleotides long, 10 to 25 nucleotides long, 15 to 30 nucleotides long, 20 to 35 nucleotides long, or 25 to 40 nucleotides long. In an exemplary embodiment, the RNAi agent comprises a duplex of between 15 to 30 nucleotides long. In some embodiments, the RNAi agent comprises a duplex of 14 nucleotides in length, a duplex of 15 nucleotides in length, 16 nucleotides in length, 17 nucleotides in length, 18 nucleotides in length, 19 nucleotides in length, or 20 nucleotides in length. In a specific embodiment, the RNAi agent comprises a duplex of 16 nucleotides in length.

[1019] In some embodiments, the RNAi agent comprises a duplex region of any length that permits specific degradation of a desired target mRNA (i.e., GCK) through RISC, and may range from about 9 to 36 nucleotides in length, e.g., about 10-30, 10-35, 14-30, 14-35, 15-30, 15-35, 24-30, or 19-23 nucleotides in length. In some embodiments, the RNAi agent comprises a duplex region of about 9, 10, 11, 12, 13, 14, 15, 16, 17, 18, 19, 20, 21, 22, 23, 24, 25, 26, 27, 28, 29, 30, 31, 32, 33, 34, 35, or 36 nucleotides in length, such as about 14-30, 14-35, 15-30, 15-29, 15-28, 15-27, 15-26, 15-25, 15-24, 15-23, 15-22, 15-21, 15-20, 15-19, 15-18, 15-17, 18-30, 18-29, 18-28, 18-27, 18-26, 18-25, 18-24, 18-23, 18-22, 18-21, 18-20, 19-30, 19-29, 19-28, 19-27, 19-26, 19-25, 19-24, 19-23, 19-22, 19-21, 19-20, 20-30, 20-29, 20-28, 20-27, 20-26, 20-25, 20-24, 20-23, 20-22, 20-21, 21-30, 21-29, 21-28, 21-27, 21-26, 21-25, 21-24, 21-23, or 21-22 nucleotides in length. Ranges and lengths intermediate to the above recited example ranges and lengths are also contemplated to be part of the invention.

TABLE 1
GCK RNA i agent antisense strand sequences.

| | | Modified | |
|---|---|---|---|
| Antisense | SEQ | Antisense | SEQ |
| Sequence | ID | Sequence | ID |
| (5′ → 3′) | NO: | (5′ → 3′) | NO: |
| CCGTCTCATCACCTTCTTCAGGT | 1 | csCfsgucUfcaucac | 193 |
| | | cUfuCfuucagsgsu | |
| ATCCGTCTCATCACCTTCTTCAG | 2 | asUfsccgUfcucauc | 194 |
| | | aCfcUfucuucsasg | |
| ATCTTCACACTGGCCTCTTCATG | 3 | asUfscuuCfacacug | 195 |
| | | gCfcUfcuucasusg | |
| GCATCTTCACACTGGCCTCTTCA | 4 | gsCfsaucUfucacac | 196 |
| | | uGfgCfcucuuscsa | |
| GAGCGCACGTAGGTGGGCAGCAT | 5 | gsAfsgcgCfacguag | 197 |
| | | gUfgGfgcagcsasu | |
| CTCACCTTCTCCCACCTTCACCA | 6 | csUfscacCfuucucc | 198 |
| | | cAfcCfuucacscsa | |
| GGTGTTTGGTCTTCACGCTCCAC | 7 | gsGfsuguUfuggucu | 199 |
| | | uCfaCfgcuccsasc | |
| ATCTGGTGTTTGGTCTTCACGCT | 8 | asUfscugGfuguuug | 200 |
| | | gUfcUfucacgscsu | |
| ACATCTGGTGTTTGGTCTTCACG | 9 | asCfsaucUfgguguu | 201 |
| | | uGfgUfcuucascsg | |
| TACATCTGGTGTTTGGTCTTCAC | 10 | usAfscauCfuggugu | 202 |
| | | uUfgGfucuucsasc | |
| AGTACATCTGGTGTTTGGTCTTC | 11 | asGfsuacAfucuggu | 203 |
| | | gUfuUfggucususc | |
| GCATCTCAGCAGTGCCGGTCATG | 12 | gsCfsaucUfcagcag | 204 |
| | | uGfcCfggucasusg | |
| AGCATCTCAGCAGTGCCGGTCAT | 13 | asGfscauCfucagca | 205 |
| | | gUfgCfcggucsasu | |
| TCGAAGAGCATCTCAGCAGTGCC | 14 | usCfsgaaGfagcauc | 206 |
| | | uCfaGfcagugscsc | |
| GTCGAAGAGCATCTCAGCAGTGC | 15 | gsUfscgaAfgagcau | 207 |
| | | cUfcAfgcagusgsc | |
| ATGTAGTCGAAGAGCATCTCAGC | 16 | asUfsguaGfucgaag | 208 |
| | | aGfcAfucucasgsc | |
| TCATCTGATGCTTGTCCAGGAAG | 17 | usCfsaucUfgaugcu | 209 |
| | | uGfuCfcaggasasg | |
| GATGCCCTTATCGATGTCTTCGT | 18 | gsAfsugcCfcuuauc | 210 |
| | | gAfuGfucuucsgsu | |
| AGGATGCCCTTATCGATGTCTTC | 19 | asGfsgauGfcccuua | 211 |
| | | uCfgAfugucususc | |
| GTTGAGAAGGATGCCCTTATCGA | 20 | gsUfsugaGfaaggau | 212 |
| | | gCfcCfuuaucsgsa | |
| TCCAGTTGAGAAGGATGCCCTTA | 21 | usCfscagUfugagaa | 213 |
| | | gGfaUfgcccususa | |
| TGGTCCAGTTGAGAAGGATGCCC | 22 | usGfsgucCfaguuga | 214 |
| | | gAfaGfgaugcscsc | |
| CATTGTTCCCTTCTGCTCCTGAG | 23 | csAfsuugUfucccuu | 215 |
| | | cUfgCfuccugsasg | |
| GACATTGTTCCCTTCTGCTCCTG | 24 | gsAfscauUfguuccc | 216 |
| | | uUfcUfgcuccsusg | |
| CGACATTGTTCCCTTCTGCTCCT | 25 | csGfsacaUfuguucc | 217 |
| | | cUfuCfugcucscsu | |
| ACGACATTGTTCCCTTCTGCTCC | 26 | asCfsgacAfuuguuc | 218 |
| | | cCfuUfcugcuscsc | |
| CCACGACATTGTTCCCTTCTGCT | 27 | csCfsacgAfcauugu | 219 |
| | | uCfcCfuucugscsu | |
| CCCACGACATTGTTCCCTTCTGC | 28 | csCfscacGfacauug | 220 |
| | | uUfcCfcuucusgsc | |
| ACCATTGCCACCACATCCATTTC | 29 | asCfscauUfgccacc | 221 |
| | | aCfaUfccauususc | |
| ATTCACCATTGCCACCACATCCA | 30 | asUfsucaCfcauugc | 222 |
| | | cAfcCfacaucscsa | |
| CATTCACCATTGCCACCACATCC | 31 | csAfsuucAfccauug | 223 |
| | | cCfaCfcacauscsc | |
| TCATTCACCATTGCCACCACATC | 32 | usCfsauuCfaccauu | 224 |
| | | gCfcAfccacasusc | |
| GTGTCATTCACCATTGCCACCAC | 33 | gsUfsgucAfuucacc | 225 |
| | | aUfuGfccaccsasc | |
| ACCGTGTCATTCACCATTGCCAC | 34 | asCfscguGfucauuc | 226 |
| | | aCfcAfuugccsasc | |
| CACCGTGTCATTCACCATTGCCA | 35 | csAfsccgUfgucauu | 227 |
| | | cAfcCfauugcscsa | |
| GGCCACCGTGTCATTCACCATTG | 36 | gsGfsccaCfcguguc | 228 |
| | | aUfuCfaccaususg | |
| TGGCCACCGTGTCATTCACCATT | 37 | usGfsgccAfccgugu | 229 |
| | | cAfuUfcaccasusu | |
| AGTAGCAGGAGATCATCGTGGCC | 38 | asGfsuagCfaggaga | 230 |
| | | uCfaUfcguggscsc | |
| TAGTAGCAGGAGATCATCGTGGC | 39 | usAfsguaGfcaggag | 231 |
| | | aUfcAfucgugsgsc | |
| GTAGTAGCAGGAGATCATCGTGG | 40 | gsUfsaguAfgcagga | 232 |
| | | gAfuCfaucgusgsg | |
| CGTAGTAGCAGGAGATCATCGTG | 41 | csGfsuagUfagcagg | 233 |
| | | aGfaUfcaucgsusg | |
| TCGTAGTAGCAGGAGATCATCGT | 42 | usCfsguaGfuagcag | 234 |
| | | gAfgAfucaucsgsu | |
| CTTCGTAGTAGCAGGAGATCATC | 43 | csUfsucgUfaguagc | 235 |
| | | aGfgAfgaucasusc | |
| TCTTCGTAGTAGCAGGAGATCAT | 44 | usCfsuucGfuaguag | 236 |
| | | cAfgGfagaucsasu | |
| CACTGATGGTCTTCGTAGTAGCA | 45 | csAfscugAfuggucu | 237 |
| | | uCfgUfaguagscsa | |
| GCACTGATGGTCTTCGTAGTAGC | 46 | gsCfsacuGfaugguc | 238 |
| | | uUfcGfuaguasgsc | |
| CTCGCACTGATGGTCTTCGTAGT | 47 | csUfscgcAfcugaug | 239 |
| | | gUfcUfucguasgsu | |
| GACCTCGCACTGATGGTCTTCGT | 48 | gsAfsccuCfgcacug | 240 |
| | | aUfgGfucuucsgsu | |
| CCGACCTCGCACTGATGGTCTTC | 49 | csCfsgacCfucgcac | 241 |
| | | uGfaUfggucususc | |
| TGCCGACCTCGCACTGATGGTCT | 50 | usGfsccgAfccucgc | 242 |
| | | aCfuGfaugguscsu | |
| CATGCCGACCTCGCACTGATGGT | 51 | csAfsugcCfgaccuc | 243 |
| | | gCfaCfugaugsgsu | |
| ATCATGCCGACCTCGCACTGATG | 52 | asUfscauGfccgacc | 244 |
| | | uCfgCfacugasusg | |
| CCACATTCTGCATCTCCTCCATG | 53 | csCfsacaUfucugca | 245 |
| | | uCfuCfcuccasusg | |
| AGGCGGTCATACTCCAGCAGGAA | 54 | asGfsgcgGfucauac | 246 |
| | | uCfcAfgcaggsasa | |
| TCCACCAGGCGGTCATACTCCAG | 55 | usCfscacCfaggcgg | 247 |
| | | uCfaUfacuccsasg | |
| GTCCACCAGGCGGTCATACTCCA | 56 | gsUfsccaCfcaggcg | 248 |
| | | gUfcAfuacucscsa | |
| CGTCCACCAGGCGGTCATACTCC | 57 | csGfsuccAfccaggc | 249 |
| | | gGfuCfauacuscsc | |
| TCGTCCACCAGGCGGTCATACTC | 58 | usCfsgucCfaccagg | 250 |
| | | cGfgUfcauacsusc | |
| CTCGTCCACCAGGCGGTCATACT | 59 | csUfscguCfcaccag | 251 |
| | | gCfgGfucauascsu | |
| GAGCTTCTCATACAGCTGCTGAC | 60 | gsAfsgcuUfoucaua | 252 |
| | | cAfgCfugcugsasc | |
| CCTATGAGCTTCTCATACAGCTG | 61 | csCfsuauGfagcuuc | 253 |
| | | uCfaUfacagcsusg | |
| CACCTATGAGCTTCTCATACAGC | 62 | csAfsccuAfugagcu | 254 |
| | | uCfuCfauacasgsc | |
| CCACCTATGAGCTTCTCATACAG | 63 | csCfsaccUfaugagc | 255 |
| | | uUfcUfcauacsasg | |
| GCCACCTATGAGCTTCTCATACA | 64 | gsCfscacCfuaugag | 256 |
| | | cUfuCfucauascsa | |
| TGCCACCTATGAGCTTCTCATAC | 65 | usGfsccaCfcuauga | 257 |
| | | gCfuUfcucausasc | |
| GTACTTGCCACCTATGAGCTTCT | 66 | gsUfsacuUfgccacc | 258 |
| | | uAfuGfagcuuscsu | |
| TGTACTTGCCACCTATGAGCTTC | 67 | usGfsuacUfugccac | 259 |
| | | cUfaUfgagcususc | |
| CCATGTACTTGCCACCTATGAGC | 68 | csCfsaugUfacuugc | 260 |
| | | cAfcCfuaugasgsc | |
| TCGCCCATGTACTTGCCACCTAT | 69 | usCfsgccCfauguac | 261 |
| | | uUfgCfcaccusasu | |
| GCTCGCCCATGTACTTGCCACCT | 70 | gsCfsucgCfccaugu | 262 |
| | | aCfuUfgccacscsu | |
| CAGCTCGCCCATGTACTTGCCAC | 71 | csAfsgcuCfgcccau | 263 |
| | | gUfaCfuugccsasc | |
| TCGTCCACGAGCCTGAGCAGCAC | 72 | usCfsgucCfacgagc | 264 |
| | | cUfgAfgcagcsasc | |
| TTCGTCCACGAGCCTGAGCAGCA | 73 | usUfscguCfcacgag | 265 |
| | | cCfuGfagcagscsa | |
| TTGTAGATCTGCTTGCGGTCGCC | 74 | usUfsguaGfaucugc | 266 |
| | | uUfgCfggucgscsc | |
| TCAGGATGTTGTAGATCTGCTTG | 75 | usCfsaggAfuguugu | 267 |
| | | aGfaUfcugcususg | |
| CGTGCTCAGGATGTTGTAGATCT | 76 | csGfsugcUfcaggau | 268 |
| | | gUfuGfuagauscsu | |
| AGCGTGCTCAGGATGTTGTAGAT | 77 | asGfscguGfcucagg | 269 |
| | | aUfgUfuguagsasu | |
| CACGCCCACAGTGATGCGCATTA | 78 | csAfscgcCfcacagu | 270 |
| | | gAfuGfcgcaususa | |
| AGCCATCCACGCCCACAGTGATG | 79 | asGfsccaUfccacgc | 271 |
| | | cCfaCfagugasusg | |
| GAGCCATCCACGCCCACAGTGAT | 80 | gsAfsgccAfuccacg | 272 |
| | | cCfcAfcagugsasu | |
| GGAGCCATCCACGCCCACAGTGA | 81 | gsGfsagcCfauccac | 273 |
| | | gCfcCfacagusgsa | |
| ACACGGAGCCATCCACGCCCACA | 82 | asCfsacgGfagccau | 274 |
| | | cCfaCfgcccascsa | |
| GTACACGGAGCCATCCACGCCCA | 83 | gsUfsacaCfggagcc | 275 |
| | | aUfcCfacgccscsa | |
| TGTACACGGAGCCATCCACGCCC | 84 | usGfsuacAfcggagc | 276 |
| | | cAfuCfcacgcscsc | |
| AGCTTGTACACGGAGCCATCCAC | 85 | asGfscuuGfuacacg | 277 |
| | | gAfgCfcauccsasc | |
| GTGATCTCGCAGCTGGGCGTCAG | 86 | gsUfsgauCfucgcag | 278 |
| | | cUfgGfgcgucsasg | |
| GACTCGATGAAGGTGATCTCGCA | 87 | gsAfscucGfaugaag | 279 |
| | | gUfgAfucucgscsa | |
| TCCGACTCGATGAAGGTGATCTC | 88 | usCfscgaCfucgaug | 280 |
| | | aAfgGfugaucsusc | |
| CTCCGACTCGATGAAGGTGATCT | 89 | csUfsccgAfcucgau | 281 |
| | | gAfaGfgugauscsu | |
| CTGACAGTGTGGAAATGCATCAA | 90 | csUfsgacAfgugugg | 282 |
| | | aAfaUfgcaucsasa | |
| CCCACACAGGATGAGTTCCCAGG | 91 | csCfscacAfcaggau | 283 |
| | | gAfgUfucccasgsg | |
| TGGTCAAGCTGTTGGAGCTGCCT | 92 | usGfsgucAfagcugu | 284 |
| | | uGfgAfgcugcscsu | |
| TAGGTCTGGTCAAGCTGTTGGAG | 93 | usAfsgguCfugguca | 285 |
| | | aGfcUfguuggsasg | |
| GTCCATCCCAGAATCACAAGCCA | 94 | gsUfsccaUfcccaga | 286 |
| | | aUfcAfcaagcscsa | |
| GGTCCATCCCAGAATCACAAGCC | 95 | gsGfsuccAfucccag | 287 |
| | | aAfuCfacaagscsc | |
| GGGTTTCTTCCTGAGCCAGCGCT | 96 | gsGfsguuUfcuuccu | 288 |
| | | gAfgCfcagcgscsu | |

TABLE 2
GCK RNA i agent sense strand sequences.

| | | | | Modified | |
|---|---|---|---|---|---|
| | | | | Sense | |
| | | | | Sequence | |
| | | | | with 3′ | |
| | | Modified | | conjugated | |
| Sense | SEQ | Sense | SEQ | targeting | SEQ |
| Sequence | ID | Sequence | ID | moiety | ID |
| (5′ → 3′) | NO: | (5′ → 3′) | NO: | (5′ → 3′) | NO: |
| CTGAAGAAGGT | 97 | csusgaagAf | 289 | csusgaagAfaGfG | 385 |
| GATGAGACGG | | aGfGfUfgau | | fUfgaugagacgg | |
| | | gagacsgsg | | | |
| GAAGAAGGTGA | 98 | gsasagaaGf | 290 | gsasagaaGfgUfG | 386 |
| TGAGACGGAT | | gUfGfAfuga | | fAfugagacggau | |
| | | gacggsasu | | | |
| TGAAGAGGCCA | 99 | usgsaagaGf | 291 | usgsaagaGfgCfC | 387 |
| GTGTGAAGAT | | gCfCfAfgug | | fAfgugugaagau | |
| | | ugaagsasu | | | |
| AAGAGGCCAGT | 100 | asasgaggCf | 292 | asasgaggCfcAfG | 388 |
| GTGAAGATGC | | cAfGfUfgug | | fUfgugaagaugc | |
| | | aagausgsc | | | |
| GCTGCCCACCT | 101 | gscsugccCf | 293 | gscsugccCfaCfC | 389 |
| ACGTGCGCTC | | aCfCfUfacg | | fUfacgugcgcuc | |
| | | ugcgcsusc | | | |
| GTGAAGGTGGG | 102 | gsusgaagGf | 294 | gsusgaagGfuGfG | 390 |
| AGAAGGTGAG | | uGfGfGfaga | | fGfagaaggugag | |
| | | aggugsasg | | | |
| GGAGCGTGAAG | 103 | gsgsagcgUf | 295 | gsgsagcgUfgAfA | 391 |
| ACCAAACACC | | gAfAfGfacc | | fGfaccaaacacc | |
| | | aaacascsc | | | |
| CGTGAAGACCA | 104 | csgsugaaGf | 296 | csgsugaaGfaCfC | 392 |
| AACACCAGAT | | aCfCfAfaac | | fAfaacaccagau | |
| | | accagsasu | | | |
| TGAAGACCAAA | 105 | usgsaagaCf | 297 | usgsaagaCfcAfA | 393 |
| CACCAGATGT | | cAfAfAfcac | | fAfcaccagaugu | |
| | | cagausgsu | | | |
| GAAGACCAAAC | 106 | gsasagacCf | 298 | gsasagacCfaAfA | 394 |
| ACCAGATGTA | | aAfAfCfacc | | fCfaccagaugua | |
| | | agaugsusa | | | |
| AGACCAAACAC | 107 | asgsaccaAf | 299 | asgsaccaAfaCfA | 395 |
| CAGATGTACT | | aCfAfCfcag | | fCfcagauguacu | |
| | | auguascsu | | | |
| TGACCGGCACT | 108 | usgsaccgGf | 300 | usgsaccgGfcAfC | 396 |
| GCTGAGATGC | | cAfCfUfgcu | | fUfgcugagaugc | |
| | | gagausgsc | | | |
| GACCGGCACTG | 109 | gsasccggCf | 301 | gsasccggCfaCfU | 397 |
| CTGAGATGCT | | aCfUfGfcug | | fGfcugagaugcu | |
| | | agaugscsu | | | |
| CACTGCTGAGA | 110 | csascugcUf | 302 | csascugcUfgAfG | 398 |
| TGCTCTTCGA | | gAfGfAfugc | | fAfugcucuucga | |
| | | ucuucsgsa | | | |
| ACTGCTGAGAT | 111 | ascsugcuGf | 303 | ascsugcuGfaGfA | 399 |
| GCTCTTCGAC | | aGfAfUfgcu | | fUfgcucuucgac | |
| | | cuucgsasc | | | |
| TGAGATGCTCT | 112 | usgsagauGf | 304 | usgsagauGfcUfC | 400 |
| TCGACTACAT | | cUfCfUfucg | | fUfucgacuacau | |
| | | acuacsasu | | | |
| TCCTGGACAAG | 113 | uscscuggAf | 305 | uscscuggAfcAfA | 401 |
| CATCAGATGA | | cAfAfGfcau | | fGfcaucagauga | |
| | | cagausgsa | | | |
| GAAGACATCGA | 114 | gsasagacAf | 306 | gsasagacAfuCfG | 402 |
| TAAGGGCATC | | uCfGfAfuaa | | fAfuaagggcauc | |
| | | gggcasusc | | | |
| AGACATCGATA | 115 | asgsacauCf | 307 | asgsacauCfgAfU | 403 |
| AGGGCATCCT | | gAfUfAfagg | | fAfagggcauccu | |
| | | gcaucscsu | | | |
| GATAAGGGCAT | 116 | gsasuaagGf | 308 | gsasuaagGfgCfA | 404 |
| CCTTCTCAAC | | gCfAfUfccu | | fUfccuucucaac | |
| | | ucucasasc | | | |
| AGGGCATCCTT | 117 | asgsggcaUf | 309 | asgsggcaUfcCfU | 405 |
| CTCAACTGGA | | cCfUfUfcuc | | fUfcucaacugga | |
| | | aacugsgsa | | | |
| GCATCCTTCTC | 118 | gscsauccUf | 310 | gscsauccUfuCfU | 406 |
| AACTGGACCA | | uCfUfCfaac | | fCfaacuggacca | |
| | | uggacscsa | | | |
| CAGGAGCAGAA | 119 | csasggagCf | 311 | csasggagCfaGfA | 407 |
| GGGAACAATG | | aGfAfAfggg | | fAfgggaacaaug | |
| | | aacaasusg | | | |
| GGAGCAGAAGG | 120 | gsgsagcaGf | 312 | gsgsagcaGfaAfG | 408 |
| GAACAATGTC | | aAfGfGfgaa | | fGfgaacaauguc | |
| | | caaugsusc | | | |
| GAGCAGAAGGG | 121 | gsasgcagAf | 313 | gsasgcagAfaGfG | 409 |
| AACAATGTCG | | aGfGfGfaac | | fGfaacaaugucg | |
| | | aauguscsg | | | |
| AGCAGAAGGGA | 122 | asgscagaAf | 314 | asgscagaAfgGfG | 410 |
| ACAATGTCGT | | gGfGfAfaca | | fAfacaaugucgu | |
| | | augucsgsu | | | |
| CAGAAGGGAAC | 123 | csasgaagGf | 315 | csasgaagGfgAfA | 411 |
| AATGTCGTGG | | gAfAfCfaau | | fCfaaugucgugg | |
| | | gucgusgsg | | | |
| AGAAGGGAACA | 124 | asgsaaggGf | 316 | asgsaaggGfaAfC | 412 |
| ATGTCGTGGG | | aAfCfAfaug | | fAfaugucguggg | |
| | | ucgugsgsg | | | |
| AATGGATGTGG | 125 | asasuggaUf | 317 | asasuggaUfgUfG | 413 |
| TGGCAATGGT | | gUfGfGfugg | | fGfuggcaauggu | |
| | | caaugsgsu | | | |
| GATGTGGTGGC | 126 | gsasugugGf | 318 | gsasugugGfuGfG | 414 |
| AATGGTGAAT | | uGfGfCfaau | | fCfaauggugaau | |
| | | ggugasasu | | | |
| ATGTGGTGGCA | 127 | asusguggUf | 319 | asusguggUfgGfC | 415 |
| ATGGTGAATG | | gGfCfAfaug | | fAfauggugaaug | |
| | | gugaasusg | | | |
| TGTGGTGGCAA | 128 | usgsugguGf | 320 | usgsugguGfgCfA | 416 |
| TGGTGAATGA | | gCfAfAfugg | | fAfuggugaauga | |
| | | ugaausgsa | | | |
| GGTGGCAATGG | 129 | gsgsuggcAf | 321 | gsgsuggcAfaUfG | 417 |
| TGAATGACAC | | aUfGfGfuga | | fGfugaaugacac | |
| | | augacsasc | | | |
| GGCAATGGTGA | 130 | gsgscaauGf | 322 | gsgscaauGfgUfG | 418 |
| ATGACACGGT | | gUfGfAfaug | | fAfaugacacggu | |
| | | acacgsgsu | | | |
| GCAATGGTGAA | 131 | gscsaaugGf | 323 | gscsaaugGfuGfA | 419 |
| TGACACGGTG | | uGfAfAfuga | | fAfugacacggug | |
| | | cacggsusg | | | |
| ATGGTGAATGA | 132 | asusggugAf | 324 | asusggugAfaUfG | 420 |
| CACGGTGGCC | | aUfGfAfcac | | fAfcacgguggcc | |
| | | gguggscsc | | | |
| TGGTGAATGAC | 133 | usgsgugaAf | 325 | usgsgugaAfuGfA | 421 |
| ACGGTGGCCA | | uGfAfCfacg | | fCfacgguggcca | |
| | | guggcscsa | | | |
| CCACGATGATC | 134 | cscsacgaUf | 326 | cscsacgaUfgAfU | 422 |
| TCCTGCTACT | | gAfUfCfucc | | fCfuccugcuacu | |
| | | ugcuascsu | | | |
| CACGATGATCT | 135 | csascgauGf | 327 | csascgauGfaUfC | 423 |
| CCTGCTACTA | | aUfCfUfccu | | fUfccugcuacua | |
| | | gcuacsusa | | | |
| ACGATGATCTC | 136 | ascsgaugAf | 328 | ascsgaugAfuCfU | 424 |
| CTGCTACTAC | | uCfUfCfcug | | fCfcugcuacuac | |
| | | cuacusasc | | | |
| CGATGATCTCC | 137 | csgsaugaUf | 329 | csgsaugaUfcUfC | 425 |
| TGCTACTACG | | cUfCfCfugc | | fCfugcuacuacg | |
| | | uacuascsg | | | |
| GATGATCTCCT | 138 | gsasugauCf | 330 | gsasugauCfuCfC | 426 |
| GCTACTACGA | | uCfCfUfgcu | | fUfgcuacuacga | |
| | | acuacsgsa | | | |
| TGATCTCCTGC | 139 | usgsaucuCf | 331 | usgsaucuCfcUfG | 427 |
| TACTACGAAG | | cUfGfCfuac | | fCfuacuacgaag | |
| | | uacgasasg | | | |
| GATCTCCTGCT | 140 | gsasucucCf | 332 | gsasucucCfuGfC | 428 |
| ACTACGAAGA | | uGfCfUfacu | | fUfacuacgaaga | |
| | | acgaasgsa | | | |
| CTACTACGAAG | 141 | csusacuaCf | 333 | csusacuaCfgAfA | 429 |
| ACCATCAGTG | | gAfAfGfacc | | fGfaccaucagug | |
| | | aucagsusg | | | |
| TACTACGAAGA | 142 | usascuacGf | 334 | usascuacGfaAfG | 430 |
| CCATCAGTGC | | aAfGfAfcca | | fAfccaucagugc | |
| | | ucagusgsc | | | |
| TACGAAGACCA | 143 | usascgaaGf | 335 | usascgaaGfaCfC | 431 |
| TCAGTGCGAG | | aCfCffuca | | fAfucagugcgag | |
| | | Agugcgsasg | | | |
| GAAGACCATCA | 144 | gsasagacCf | 336 | gsasagacCfaUfC | 432 |
| GTGCGAGGTC | | aUfCfAfgug | | fAfgugcgagguc | |
| | | cgaggsusc | | | |
| AGACCATCAGT | 145 | asgsaccaUf | 337 | asgsaccaUfcAfG | 433 |
| GCGAGGTCGG | | cAfGfUfgcg | | fUfgcgaggucgg | |
| | | aggucsgsg | | | |
| ACCATCAGTGC | 146 | ascscaucAf | 338 | ascscaucAfgUfG | 434 |
| GAGGTCGGCA | | gUfGfCfgag | | fCfgaggucggca | |
| | | gucggscsa | | | |
| CATCAGTGCGA | 147 | csasucagUf | 339 | csasucagUfgCfG | 435 |
| GGTCGGCATG | | gCfGfAfggu | | fAfggucggcaug | |
| | | cggcasusg | | | |
| TCAGTGCGAGG | 148 | uscsagugCf | 340 | uscsagugCfgAfG | 436 |
| TCGGCATGAT | | gAfGfGfucg | | fGfucggcaugau | |
| | | gcaugsasu | | | |
| TGGAGGAGATG | 149 | usgsgaggAf | 341 | usgsgaggAfgAfU | 437 |
| CAGAATGTGG | | gAfUfGfcag | | fGfcagaaugugg | |
| | | aaugusgsg | | | |
| CCTGCTGGAGT | 150 | cscsugcuGf | 342 | cscsugcuGfgAfG | 438 |
| ATGACCGCCT | | gAfGfUfaug | | fUfaugaccgccu | |
| | | accgcscsu | | | |
| GGAGTATGACC | 151 | gsgsaguaUf | 343 | gsgsaguaUfgAfC | 439 |
| GCCTGGTGGA | | gAfCfCfgcc | | fCfgccuggugga | |
| | | uggugsgsa | | | |
| GAGTATGACCG | 152 | gsasguauGf | 344 | gsasguauGfaCfC | 440 |
| CCTGGTGGAC | | aCfCfGfccu | | fGfccugguggac | |
| | | gguggsasc | | | |
| AGTATGACCGC | 153 | asgsuaugAf | 345 | asgsuaugAfcCfG | 441 |
| CTGGTGGACG | | cCfGfCfcug | | fCfcugguggacg | |
| | | guggascsg | | | |
| GTATGACCGCC | 154 | gsusaugaCf | 346 | gsusaugaCfcGfC | 442 |
| TGGTGGACGA | | cGfCfCfugg | | fCfugguggacga | |
| | | uggacsgsa | | | |
| TATGACCGCCT | 155 | usasugacCf | 347 | usasugacCfgCfC | 443 |
| GGTGGACGAG | | gCfCfUfggu | | fUfgguggacgag | |
| | | ggacgsasg | | | |
| CAGCAGCTGTA | 156 | csasgcagCf | 348 | csasgcagCfuGfU | 444 |
| TGAGAAGCTC | | uGfUfAfuga | | fAfugagaagcuc | |
| | | gaagcsusc | | | |
| GCTGTATGAGA | 157 | gscsuguaUf | 349 | gscsuguaUfgAfG | 445 |
| AGCTCATAGG | | gAfGfAfagc | | fAfagcucauagg | |
| | | ucauasgsg | | | |
| TGTATGAGAAG | 158 | usgsuaugAf | 350 | usgsuaugAfgAfA | 446 |
| CTCATAGGTG | | gAfAfGfcuc | | fGfcucauaggug | |
| | | auaggsusg | | | |
| GTATGAGAAGC | 159 | gsusaugaGf | 351 | gsusaugaGfaAfG | 447 |
| TCATAGGTGG | | aAfGfCfuca | | fCfucauaggugg | |
| | | uaggusgsg | | | |
| TATGAGAAGCT | 160 | usasugagAf | 352 | usasugagAfaGfC | 448 |
| CATAGGTGGC | | aGfCfUfcau | | fUfcauagguggc | |
| | | aggugsgsc | | | |
| ATGAGAAGCTC | 161 | asusgagaAf | 353 | asusgagaAfgCfU | 449 |
| ATAGGTGGCA | | gCfUfCfaua | | fCfauagguggca | |
| | | gguggscsa | | | |
| AAGCTCATAGG | 162 | asasgcucAf | 354 | asasgcucAfuAfG | 450 |
| TGGCAAGTAC | | uAfGfGfugg | | fGfuggcaaguac | |
| | | caagusasc | | | |
| AGCTCATAGGT | 163 | asgscucaUf | 355 | asgscucaUfaGfG | 451 |
| GGCAAGTACA | | aGfGfUfggc | | fUfggcaaguaca | |
| | | aaguascsa | | | |
| TCATAGGTGGC | 164 | uscsauagGf | 356 | uscsauagGfuGfG | 452 |
| AAGTACATGG | | uGfGfCfaag | | fCfaaguacaugg | |
| | | uacausgsg | | | |
| AGGTGGCAAGT | 165 | asgsguggCf | 357 | asgsguggCfaAfG | 453 |
| ACATGGGCGA | | aAfGfUfaca | | fUfacaugggcga | |
| | | ugggcsgsa | | | |
| GTGGCAAGTAC | 166 | gsusggcaAf | 358 | gsusggcaAfgUfA | 454 |
| ATGGGCGAGC | | gUfAfCfaug | | fCfaugggcgagc | |
| | | ggcgasgsc | | | |
| GGCAAGTACAT | 167 | gsgscaagUf | 359 | gsgscaagUfaCfA | 455 |
| GGGCGAGCTG | | aCfAfUfggg | | fUfgggcgagcug | |
| | | cgagcsusg | | | |
| GCTGCTCAGGC | 168 | gscsugcuCf | 360 | gscsugcuCfaGfG | 456 |
| TCGTGGACGA | | aGfGfCfucg | | fCfucguggacga | |
| | | uggacsgsa | | | |
| CTGCTCAGGCT | 169 | csusgcucAf | 361 | csusgcucAfgGfC | 457 |
| CGTGGACGAA | | gGfCfUfcgu | | fUfcguggacgaa | |
| | | ggacgsasa | | | |
| CGACCGCAAGC | 170 | csgsaccgCf | 362 | csgsaccgCfaAfG | 458 |
| AGATCTACAA | | aAfGfCfaga | | fCfagaucuacaa | |
| | | ucuacsasa | | | |
| AGCAGATCTAC | 171 | asgscagaUf | 363 | asgscagaUfcUfA | 459 |
| AACATCCTGA | | cUfAfCfaac | | fCfaacauccuga | |
| | | auccusgsa | | | |
| ATCTACAACAT | 172 | asuscuacAf | 364 | asuscuacAfaCfA | 460 |
| CCTGAGCACG | | aCfAfUfccu | | fUfccugagcacg | |
| | | gagcascsg | | | |
| CTACAACATCC | 173 | csusacaaCf | 365 | csusacaaCfaUfC | 461 |
| TGAGCACGCT | | aUfCfCfuga | | fCfugagcacgcu | |
| | | gcacgscsu | | | |
| ATGCGCATCAC | 174 | asusgcgcAf | 366 | asusgcgcAfuCfA | 462 |
| TGTGGGCGTG | | uCfAfCfugu | | fCfugugggcgug | |
| | | gggcgsusg | | | |
| TCACTGTGGGC | 175 | uscsacugUf | 367 | uscsacugUfgGfG | 463 |
| GTGGATGGCT | | gGfGfCfgug | | fCfguggauggcu | |
| | | gauggscsu | | | |
| CACTGTGGGCG | 176 | csascuguGf | 368 | csascuguGfgGfC | 464 |
| TGGATGGCTC | | gGfCfGfugg | | fGfuggauggcuc | |
| | | auggcsusc | | | |
| ACTGTGGGCGT | 177 | ascsugugGf | 369 | ascsugugGfgCfG | 465 |
| GGATGGCTCC | | gCfGfUfgga | | fUfggauggcucc | |
| | | uggcuscsc | | | |
| TGGGCGTGGAT | 178 | usgsggcgUf | 370 | usgsggcgUfgGfA | 466 |
| GGCTCCGTGT | | gGfAfUfggc | | fUfggcuccgugu | |
| | | uccgusgsu | | | |
| GGCGTGGATGG | 179 | gsgscgugGf | 371 | gsgscgugGfaUfG | 467 |
| CTCCGTGTAC | | aUfGfGfcuc | | fGfcuccguguac | |
| | | cgugusasc | | | |
| GCGTGGATGGC | 180 | gscsguggAf | 372 | gscsguggAfuGfG | 468 |
| TCCGTGTACA | | uGfGfCfucc | | fCfuccguguaca | |
| | | guguascsa | | | |
| GGATGGCTCCG | 181 | gsgsauggCf | 373 | gsgsauggCfuCfC | 469 |
| TGTACAAGCT | | uCfCfGfugu | | fGfuguacaagcu | |
| | | acaagscsu | | | |
| GACGCCCAGCT | 182 | gsascgccCf | 374 | gsascgccCfaGfC | 470 |
| GCGAGATCAC | | aGfCfUfgcg | | fUfgcgagaucac | |
| | | agaucsasc | | | |
| CGAGATCACCT | 183 | csgsagauCf | 375 | csgsagauCfaCfC | 471 |
| TCATCGAGTC | | aCfCfUfuca | | fUfucaucgaguc | |
| | | ucgagsusc | | | |
| GATCACCTTCA | 184 | gsasucacCf | 376 | gsasucacCfuUfC | 472 |
| TCGAGTCGGA | | uUfCfAfucg | | fAfucgagucgga | |
| | | agucgsgsa | | | |
| ATCACCTTCAT | 185 | asuscaccUf | 377 | asuscaccUfuCfA | 473 |
| CGAGTCGGAG | | uCfAfUfcga | | fUfcgagucggag | |
| | | gucggsasg | | | |
| GATGCATTTCC | 186 | gsasugcaUf | 378 | gsasugcaUfuUfC | 474 |
| ACACTGTCAG | | uUfCfCfaca | | fCfacacugucag | |
| | | cugucsasg | | | |
| TGGGAACTCAT | 187 | usgsggaaCf | 379 | usgsggaaCfuCfA | 475 |
| CCTGTGTGGG | | uCfAfUfccu | | fUfccuguguggg | |
| | | gugugsgsg | | | |
| GCAGCTCCAAC | 188 | gscsagcuCf | 380 | gscsagcuCfcAfA | 476 |
| AGCTTGACCA | | cAfAfCfagc | | fCfagcuugacca | |
| | | uugacscsa | | | |
| CCAACAGCTTG | 189 | cscsaacaGf | 381 | cscsaacaGfcUfU | 477 |
| ACCAGACCTA | | cUfUfGfacc | | fGfaccagaccua | |
| | | agaccsusa | | | |
| GCTTGTGATTC | 190 | gscsuuguGf | 382 | gscsuuguGfaUfU | 478 |
| TGGGATGGAC | | aUfUfCfugg | | fCfugggauggac | |
| | | gauggsasc | | | |
| CTTGTGATTCT | 191 | csusugugAf | 383 | csusugugAfuUfC | 479 |
| GGGATGGACC | | uUfCfUfggg | | fUfgggauggacc | |
| | | auggascsc | | | |
| CGCTGGCTCAG | 192 | csgscuggCf | 384 | csgscuggCfuCfA | 480 |
| GAAGAAACCC | | uCfAfGfgaa | | fGfgaagaaaccc | |
| | | gaaacscsc | | | |

[1020] In some embodiments, the antisense strand of the RNAi agent comprises a nucleotide sequence of any of the sequences in Table 1. In some embodiments, the antisense strand comprises a nucleotide sequence set forth in any of SEQ ID NOs: 1-96 or 193-288. In some embodiments, the antisense comprises a sequence that has at least at or about 80%, at or about 81%, at or about 82%, at or about 83%, at or about 84%, at or about 85%, at or about 86%, at or about 87%, at or about 88%, at or about 89%, at or about 90%, at or about 91%, at or about 92%, at or about 93%, at or about 94%, at or about 95%, at or about 96%, at or about 97%, at or about 98%, or at or about 99% sequence identity to the sequences set forth in any of SEQ ID NOs: 1-96 or 193-288. In some embodiments, the antisense strand or a subsequence thereof of the RNAi agent differs by 0, 1, 2, 3, or 4 nucleotides from an equal length portion of any of the antisense strand sequences set forth in any of SEQ ID NOs: 1-96 or 193-288, wherein the subsequence is at least 14, 15, 16, 17, 18, 19, 20, 21, 22, or 23 bases in length.

[1021] In some embodiments, the antisense strand of the RNAi agent comprises at least 10, 11, 12, 13, 14, 15, 16, 17, 18, 19, 20, 21, 22, or 23 contiguous bases from any one of SEQ ID NOs: 1-96 or 193-288. In some embodiments, the antisense strand comprises, in order, nucleobases 1-16, 1-17, 1-18, 1-19, 1-20, 1-21, 1-22, 1-23, 2-17, 2-18, 2-19, 2-20, 2-21, 2-22, 2 23, 3-18, 4-19, 4-20, 4-21, 4-22, 4-23, 5-21, 5-22, 5-23, 6-20, 6-21, 6-22, 6-23, 7-22, 7-23, or 8-23 of any one of SEQ ID NOS: 1-96 or 193-288.

[1022] In some embodiments, the sense strand of the RNAi agent comprises a nucleotide sequence of any of the sequences in Table 2. In some embodiments, the sense strand comprises a nucleotide sequence set forth in any of SEQ ID NOs: 97-192, 289-384, or 385-480. In some embodiments, the sense strand comprises a sequence that has at least at or about 80%, at or about 81%, at or about 82%, at or about 83%, at or about 84%, at or about 85%, at or about 86%, at or about 87%, at or about 88%, at or about 89%, at or about 90%, at or about 91%, at or about 92%, at or about 93%, at or about 94%, at or about 95%, at or about 96%, at or about 97%, at or about 98%, or at or about 99% sequence identity to the sequences set forth in any of SEQ ID NOs: 97-192, 289-384, or 385-480. In some embodiments, the sense strand or a subsequences thereof of the RNAi agent differs by 0, 1, 2, 3, or 4 nucleotides from an equal length portion of any of the sense strand sequences set forth in any of SEQ ID NOs: 97-192, 289-384, or 385-480, wherein the subsequence is at least 14, 15, 16, 17, 18, 19, 20, or 21 bases in length.

[1023] In some embodiments, the sense strand of the RNAi agent comprises at least 10, 11, 12, 13, 14, 15, 16, 17, 18, 19, or 20 contiguous bases from any one of SEQ ID NOS: 97-192, 289-384, or 385-480. In some embodiments, the sense strand comprises, in order, nucleobases 1-16, 1-17, 1-18, 1-19, 1-20, 1-21, 1-22, 1-23, 2-17, 2-18, 2-19, 2-20, 2-21, 2-22, 2 23, 3-18, 4-19, 4-20, 4-21, 4-22, 4-23, 5-21, 5-22, 5-23, 6-20, 6-21, 6-22, 6-23, 7-22, 7-23, or 8-23 of any one of SEQ ID NOS: 97-192, 289-384, or 385-480.

[1024] Among the RNAi agents provided herein, the RNAi agent comprises an antisense strand comprising a nucleotide sequence having at least at or about 80%, at or about 81%, at or about 82%, at or about 83%, at or about 84%, at or about 85%, at or about 86%, at or about 87%, at or about 88%, at or about 89%, at or about 90%, at or about 91%, at or about 92%, at or about 93%, at or about 94%, at or about 95%, at or about 96%, at or about 97%, at or about 98%, or at or about 99% sequence identity to the sequences set forth in any of SEQ ID NOs: 1-96 and a sense strand comprising a nucleotide sequence having at least at or about 80%, at or about 81%, at or about 82%, at or about 83%, at or about 84%, at or about 85%, at or about 86%, at or about 87%, at or about 88%, at or about 89%, at or about 90%, at or about 91%, at or about 92%, at or about 93%, at or about 94%, at or about 95%, at or about 96%, at or about 97%, at or about 98%, or at or about 99% sequence identity to the sequences set forth in any of SEQ ID NOs: 97-192.

[1025] In some embodiments, the antisense strand of the RNAi agent comprises a nucleotide sequence of any of SEQ ID NO: 1-96 and the sense strand of the RNAi agent comprises a nucleotide sequence of any of SEQ ID NO: 97-192. In some embodiments, the antisense and the sense strands of the RNAi agent comprise the nucleotide sequences of SEQ ID NOs: 1 and 97, respectively; SEQ ID NOs: 2 and 98, respectively; SEQ ID NOs: 3 and 99, respectively; SEQ ID NOs: 4 and 100, respectively; SEQ ID NOs: 5 and 101, respectively; SEQ ID NOs: 6 and 102, respectively; SEQ ID NOs: 7 and 103, respectively; SEQ ID NOs: 8 and 104, respectively; SEQ ID NOs: 9 and 105, respectively; SEQ ID NOs: 10 and 106, respectively; SEQ ID NOs: 11 and 107, respectively; SEQ ID NOs: 12 and 108, respectively; SEQ ID NOs: 13 and 109, respectively; SEQ ID NOs: 14 and 110, respectively; SEQ ID NOs: 15 and 111, respectively; SEQ ID NOs: 16 and 112, respectively; SEQ ID NOs: 17 and 113, respectively; SEQ ID NOs: 18 and 114, respectively; SEQ ID NOs: 19 and 115, respectively; or SEQ ID NOs: 20 and 116, respectively, or any antisense or sense strand that has at least 80% sequence identity to any of the above sequences, such as at least 80%, 81%, 82%, 83%, 84%, 85%, 86%, 87%, 88%, 89%, 90%, 91%, 92%, 93%, 94%, 95%, 96%, 97%, 98%, or 99% sequence identity thereto.

[1026] In some embodiments, the antisense and the sense strands of the RNAi agent comprise the nucleotide sequences of SEQ ID NOs: 21 and 117, respectively; SEQ ID NOs: 22 and 118, respectively; SEQ ID NOs: 23 and 119, respectively; SEQ ID NOs: 24 and 120, respectively; SEQ ID NOs: 25 and 121, respectively; SEQ ID NOs: 26 and 122, respectively; SEQ ID NOs: 27 and 123, respectively; SEQ ID NOs: 28 and 124, respectively; SEQ ID NOs: 29 and 125, respectively; SEQ ID NOs: 30 and 126, respectively; SEQ ID NOs: 31 and 127, respectively; SEQ ID NOs: 32 and 128, respectively; SEQ ID NOs: 33 and 129, respectively; SEQ ID NOs: 34 and 130, respectively; SEQ ID NOs: 35 and 131, respectively; SEQ ID NOs: 36 and 132, respectively; SEQ ID NOs: 37 and 133, respectively; SEQ ID NOs: 38 and 134, respectively; SEQ ID NOs: 39 and 135, respectively; or SEQ ID NOs: 40 and 136, respectively, or any antisense or sense strand that has at least 80% sequence identity to any of the above sequences, such as at least 80%, 81%, 82%, 83%, 84%, 85%, 86%, 87%, 88%, 89%, 90%, 91%, 92%, 93%, 94%, 95%, 96%, 97%, 98%, or 99% sequence identity thereto.

[1027] In some embodiments, the antisense and the sense strands of the RNAi agent comprise the nucleotide sequences of SEQ ID NOs: 41 and 137, respectively; SEQ ID NOs: 42 and 138, respectively; SEQ ID NOs: 43 and 139, respectively; SEQ ID NOs: 44 and 140, respectively; SEQ ID NOs: 45 and 141, respectively; SEQ ID NOs: 46 and 142, respectively; SEQ ID NOs: 47 and 143, respectively; SEQ ID NOs: 48 and 144, respectively; SEQ ID NOs: 49 and 145, respectively; SEQ ID NOs: 50 and 146, respectively; SEQ ID NOs: 51 and 147, respectively; SEQ ID NOs: 52 and 148, respectively; SEQ ID NOs: 53 and 149, respectively; SEQ ID NOs: 54 and 150, respectively; SEQ ID NOs: 55 and 151, respectively; SEQ ID NOs: 56 and 152, respectively; SEQ ID NOs: 57 and 153, respectively; SEQ ID NOs: 58 and 154, respectively; SEQ ID NOs: 59 and 155, respectively; or SEQ ID NOs: 60 and 156, respectively, or any antisense or sense strand that has at least 80% sequence identity to any of the above sequences, such as at least 80%, 81%, 82%, 83%, 84%, 85%, 86%, 87%, 88%, 89%, 90%, 91%, 92%, 93%, 94%, 95%, 96%, 97%, 98%, or 99% sequence identity thereto.

[1028] In some embodiments, the antisense and the sense strands of the RNAi agent comprise the nucleotide sequences of SEQ ID NOs: 61 and 157, respectively; SEQ ID NOs: 62 and 158, respectively; SEQ ID NOs: 63 and 159, respectively; SEQ ID NOs: 64 and 160, respectively; SEQ ID NOs: 65 and 161, respectively; SEQ ID NOs: 66 and 162, respectively; SEQ ID NOs: 67 and 163, respectively; SEQ ID NOs: 68 and 164, respectively; SEQ ID NOs: 69 and 165, respectively; SEQ ID NOs: 70 and 166, respectively; SEQ ID NOs: 71 and 167, respectively; SEQ ID NOs: 72 and 168, respectively; SEQ ID NOs: 73 and 169, respectively; SEQ ID NOs: 74 and 170, respectively; SEQ ID NOs: 75 and 171, respectively; SEQ ID NOs: 76 and 172, respectively; SEQ ID NOs: 77 and 173, respectively; SEQ ID NOs: 78 and 174, respectively; SEQ ID NOs: 79 and 175, respectively; or SEQ ID NOs: 80 and 176, respectively, or any antisense or sense strand that has at least 80% sequence identity to any of the above sequences, such as at least 80%, 81%, 82%, 83%, 84%, 85%, 86%, 87%, 88%, 89%, 90%, 91%, 92%, 93%, 94%, 95%, 96%, 97%, 98%, or 99% sequence identity thereto.

[1029] In some embodiments, the antisense and the sense strands of the RNAi agent comprise the nucleotide sequences of SEQ ID NOs: 81 and 177, respectively; SEQ ID NOs: 82 and 178, respectively; SEQ ID NOs: 83 and 179, respectively; SEQ ID NOs: 84 and 180, respectively; SEQ ID NOs: 85 and 181, respectively; SEQ ID NOs: 86 and 182, respectively; SEQ ID NOs: 87 and 183, respectively; SEQ ID NOs: 88 and 184, respectively; SEQ ID NOs: 89 and 185, respectively; SEQ ID NOs: 90 and 186, respectively; SEQ ID NOs: 91 and 187, respectively; SEQ ID NOs: 92 and 188, respectively; SEQ ID NOs: 93 and 189, respectively; SEQ ID NOs: 94 and 190, respectively; SEQ ID NOs: 95 and 191, respectively; or SEQ ID NOs: 96 and 192, respectively, or any antisense or sense strand that has at least 80% sequence identity to any of the above sequences, such as at least 80%, 81%, 82%, 83%, 84%, 85%, 86%, 87%, 88%, 89%, 90%, 91%, 92%, 93%, 94%, 95%, 96%, 97%, 98%, or 99% sequence identity thereto.

[1030] In some embodiments, the RNAi agent is prepared or provided as a salt, mixed salt, or a free-acid. In some embodiments, the RNAi agent is prepared as a sodium salt. Such forms are within the scope of the embodiments disclosed herein.

[1031] In some embodiments, the GCK RNAi agent comprises an antisense strand and a sense strand having the nucleotide sequences of any of the antisense strand/sense strand duplexes of Table 3. In some embodiments, the GCK RNAi agent comprises an antisense strand and a sense strand having the nucleotide sequences of any of the antisense strand/sense strand duplexes of Table 3, and further comprises an asialoglycoprotein receptor ligand targeting group. In some embodiments, the GCK RNAi agent comprises any of the duplexes of Table 3.

TABLE 3
Examples of GCK RNAi agent duplexes.

| | | | | | Modified Sense |
|---|---|---|---|---|---|
| | | | Modified | Modified | Strand with 3′ |
| | Antisense | Sense | Antisense | Sense | conjugated |
| | Strand | Strand | Strand | Strand | targeting |
| Duplex | SEQ | SEQ | SEQ | SEQ | moiety SEQ |
| ID NO: | ID NO: | ID NO: | ID NO: | ID NO: | ID NO: |
| 572 | 1 | 97 | 193 | 289 | 385 |
| 574 | 2 | 98 | 194 | 290 | 386 |
| 634 | 3 | 99 | 195 | 291 | 387 |
| 636 | 4 | 100 | 196 | 292 | 388 |
| 655 | 5 | 101 | 197 | 293 | 389 |
| 749 | 6 | 102 | 198 | 294 | 390 |
| 780 | 7 | 103 | 199 | 295 | 391 |
| 784 | 8 | 104 | 200 | 296 | 392 |
| 786 | 9 | 105 | 201 | 297 | 393 |
| 787 | 10 | 106 | 202 | 298 | 394 |
| 789 | 11 | 107 | 203 | 299 | 395 |
| 828 | 12 | 108 | 204 | 300 | 396 |
| 829 | 13 | 109 | 205 | 301 | 397 |
| 835 | 14 | 110 | 206 | 302 | 398 |
| 836 | 15 | 111 | 207 | 303 | 399 |
| 841 | 16 | 112 | 208 | 304 | 400 |
| 882 | 17 | 113 | 209 | 305 | 401 |
| 953 | 18 | 114 | 210 | 306 | 402 |
| 955 | 19 | 115 | 211 | 307 | 403 |
| 962 | 20 | 116 | 212 | 308 | 404 |
| 966 | 21 | 117 | 213 | 309 | 405 |
| 969 | 22 | 118 | 214 | 310 | 406 |
| 1005 | 23 | 119 | 215 | 311 | 407 |
| 1007 | 24 | 120 | 216 | 312 | 408 |
| 1008 | 25 | 121 | 217 | 313 | 409 |
| 1009 | 26 | 122 | 218 | 314 | 410 |
| 1011 | 27 | 123 | 219 | 315 | 411 |
| 1012 | 28 | 124 | 220 | 316 | 412 |
| 1072 | 29 | 125 | 221 | 317 | 413 |
| 1076 | 30 | 126 | 222 | 318 | 414 |
| 1077 | 31 | 127 | 223 | 319 | 415 |
| 1078 | 32 | 128 | 224 | 320 | 416 |
| 1081 | 33 | 129 | 225 | 321 | 417 |
| 1084 | 34 | 130 | 226 | 322 | 418 |
| 1085 | 35 | 131 | 227 | 323 | 419 |
| 1088 | 36 | 132 | 228 | 324 | 420 |
| 1089 | 37 | 133 | 229 | 325 | 421 |
| 1107 | 38 | 134 | 230 | 326 | 422 |
| 1108 | 39 | 135 | 231 | 327 | 423 |
| 1109 | 40 | 136 | 232 | 328 | 424 |
| 1110 | 41 | 137 | 233 | 329 | 425 |
| 1111 | 42 | 138 | 234 | 330 | 426 |
| 1113 | 43 | 139 | 235 | 331 | 427 |
| 1114 | 44 | 140 | 236 | 332 | 428 |
| 1123 | 45 | 141 | 237 | 333 | 429 |
| 1124 | 46 | 142 | 238 | 334 | 430 |
| 1127 | 47 | 143 | 239 | 335 | 431 |
| 1130 | 48 | 144 | 240 | 336 | 432 |
| 1132 | 49 | 145 | 241 | 337 | 433 |
| 1134 | 50 | 146 | 242 | 338 | 434 |
| 1136 | 51 | 147 | 243 | 339 | 435 |
| 1138 | 52 | 148 | 244 | 340 | 436 |
| 1188 | 53 | 149 | 245 | 341 | 437 |
| 1291 | 54 | 150 | 246 | 342 | 438 |
| 1297 | 55 | 151 | 247 | 343 | 439 |
| 1298 | 56 | 152 | 248 | 344 | 440 |
| 1299 | 57 | 153 | 249 | 345 | 441 |
| 1300 | 58 | 154 | 250 | 346 | 442 |
| 1301 | 59 | 155 | 251 | 347 | 443 |
| 1340 | 60 | 156 | 252 | 348 | 444 |
| 1345 | 61 | 157 | 253 | 349 | 445 |
| 1347 | 62 | 158 | 254 | 350 | 446 |
| 1348 | 63 | 159 | 255 | 351 | 447 |
| 1349 | 64 | 160 | 256 | 352 | 448 |
| 1350 | 65 | 161 | 257 | 353 | 449 |
| 1355 | 66 | 162 | 258 | 354 | 450 |
| 1356 | 67 | 163 | 259 | 355 | 451 |
| 1359 | 68 | 164 | 260 | 356 | 452 |
| 1363 | 69 | 165 | 261 | 357 | 453 |
| 1365 | 70 | 166 | 262 | 358 | 454 |
| 1367 | 71 | 167 | 263 | 359 | 455 |
| 1399 | 72 | 168 | 264 | 360 | 456 |
| 1400 | 73 | 169 | 265 | 361 | 457 |
| 1513 | 74 | 170 | 266 | 362 | 458 |
| 1521 | 75 | 171 | 267 | 363 | 459 |
| 1526 | 76 | 172 | 268 | 364 | 460 |
| 1528 | 77 | 173 | 269 | 365 | 461 |
| 1688 | 78 | 174 | 270 | 366 | 462 |
| 1695 | 79 | 175 | 271 | 367 | 463 |
| 1696 | 80 | 176 | 272 | 368 | 464 |
| 1697 | 81 | 177 | 273 | 369 | 465 |
| 1701 | 82 | 178 | 274 | 370 | 466 |
| 1703 | 83 | 179 | 275 | 371 | 467 |
| 1704 | 84 | 180 | 276 | 372 | 468 |
| 1708 | 85 | 181 | 277 | 373 | 469 |
| 1774 | 86 | 182 | 278 | 374 | 470 |
| 1786 | 87 | 183 | 279 | 375 | 471 |
| 1789 | 88 | 184 | 280 | 376 | 472 |
| 1790 | 89 | 185 | 281 | 377 | 473 |
| 2180 | 90 | 186 | 282 | 378 | 474 |
| 2273 | 91 | 187 | 283 | 379 | 475 |
| 2297 | 92 | 188 | 284 | 380 | 476 |
| 2303 | 93 | 189 | 285 | 381 | 477 |
| 2492 | 94 | 190 | 286 | 382 | 478 |
| 2493 | 95 | 191 | 287 | 383 | 479 |
| 2609 | 96 | 192 | 288 | 384 | 480 |

### A. Modified Nucleotides

[1032] In some embodiments, the RNAi agent comprise an antisense strand and a sense strand, wherein all or substantially all of the nucleotides in the sense strand are modified. In some embodiments, the RNAi agent comprise an antisense strand and a sense strand, wherein all or substantially all of the nucleotides in the antisense strand are modified. In some embodiments, the RNAi agent comprises an antisense strand that comprises a nucleobase sequence differing by 0, 1, 2, 3 or 4 nucleobases from an equal length portion of any of SEQ ID NOs: 1-96. In some embodiments, the RNAi agent comprises an antisense strand that comprises a nucleobase sequence differing by 1 nucleobase from any of SEQ ID NOs: 1-96. In some embodiments, the RNAi agent comprises a sense strand that comprises a nucleobase sequence differing by 0, 1, 2, 3 or 4 nucleobases from any of SEQ ID NOs: 97-192. In some embodiments, the RNAi agent comprises a sense strand that comprises a nucleobase sequence differing by 1 nucleobase from any of SEQ ID NOs: 97-192.

[1033] In some embodiments, the RNAi agent comprises one or more modified nucleotides. As used herein, a “modified nucleotide” is a nucleotide other than a ribonucleotide (2′-hydroxyl nucleotide). In some embodiments, at least 50% (e.g., at least 60%, at least 70%, at least 80%, at least 90%, at least 95%, at least 97%, at least 98%, at least 99%, or 100%) of the nucleotides are modified nucleotides. As used herein, modified nucleotides include, but are not limited to, deoxyribonucleotides, nucleotide mimics, abasic nucleotides (represented herein as Ab), 2′-modified nucleotides, 3′ to 3′ linkages (inverted) nucleotides (represented herein as invdN, invN, invn, invAb), nonnatural base-comprising nucleotides, bridged nucleotides, peptide nucleic acids (PNAs), 2′, 3′seco nucleotide mimics (unlocked nucleobase analogues, represented herein as N_{UNA} or NU NA), locked nucleotides (represented herein as N_{LNA} or NLNA), 3′-O-methoxy (2′ internucleoside linked) nucleotides (represented herein as 3′-OMen), 2′-F-Arabino nucleotides (represented herein as NfANA or Nf_{ANA}), 5′-Me, 2′-fluoro nucleotide (represented herein as 5Me-Nf), morpholino nucleotides, vinyl phosphonate deoxyribonucleotides (represented herein as vpdN), vinyl phosphonate containing nucleotides, and cyclopropyl phosphonate containing nucleotides (cPrpN). 2′-modified nucleotides (i.e. a nucleotide with a group other than a hydroxyl group at the 2′ position of the five-membered sugar ring) include, but are not limited to, 2′-O-methyl nucleotides (represented herein as a lower case letter ‘n’ in a nucleotide sequence), 2′-deoxy-2′-fluoro nucleotides (represented herein as Nf, also represented herein as 2′-fluoro nucleotide), 2′-deoxy nucleotides (represented herein as dN), 2′-methoxyethyl (2′-O-2-methoxylethyl) nucleotides (represented herein as NM or 2′-MOE), 2′-amino nucleotides, and 2′-alkyl nucleotides. It is not necessary for all positions in a given compound to be uniformly modified. Conversely, more than one modification may be incorporated in a single RNAi agent or even in a single nucleotide thereof. The RNAi agent sense strands and antisense strands may be synthesized and/or modified by methods known in the art. Modification at one nucleotide is independent of modification at another nucleotide.

[1034] Modified nucleobases include synthetic and natural nucleobases, such as 5-substituted pyrimidines, 6-azapyrimidines and N-2, N-6 and 0-6 substituted purines, (e.g., 2-aminopropyladenine, 5-propynyluracil, or 5-propynylcytosine), 5-methylcytosine (5-me-C), 5hydroxymethyl cytosine, xanthine, hypoxanthine, 2-aminoadenine, 6-alkyl (e.g., 6-methyl, 6-ethyl, 6-isopropyl, or 6-n-butyl) derivatives of adenine and guanine, 2-alkyl (e.g., 2-methyl, 2-ethyl, 2-isopropyl, or 2-n-butyl) and other alkyl derivatives of adenine and guanine, 2-thiouracil, 2-thiothymine, 2-thiocytosine, 5-halouracil, cytosine, 5propynyl uracil, 5propynyl cytosine, 6-azo uracil, 6-azo cytosine, 6-azo thymine, 5-uracil (pseudouracil), 4thiouracil, 8-halo, 8amino, 8-sulfhydryl, 8-thioalkyl, 8-hydroxyl and other 8-substituted adenines and guanines, 5-halo (e.g., 5-bromo), 5-trifluoromethyl, and other 5-substituted uracils and cytosines, 7methylguanine and 7-methyladenine, 8-azaguanine and 8-azaadenine, 7-deazaguanine, 7deazaadenine, 3-deazaguanine, and 3-deazaadenine.

[1035] In some embodiments, the 3′ end and/or the 5′ end of the sense strand may include additional abasic nucleosides. In some embodiments, an “A” may be added to the 3′ terminal end of the sense strand. In some embodiments, the one or more abasic nucleosides added to the 3′ end or 5′ end of the sense strand may be inverted (invAb). In some embodiments, one or more inverted abasic nucleosides may be inserted between the targeting ligand and the nucleobase sequence of the sense strand of the RNAi agent. In some embodiments, the inclusion of one or more inverted abasic nucleosides at or near the terminal end or terminal ends of the sense strand of an RNAi agent may allow for enhanced activity or other desired properties of an RNAi agent.

[1036] In some embodiments, the 3′ end and/or the 5′ end of the antisense strand may include additional abasic nucleosides. In some embodiments, a “U” may be added to the 5′ terminal end of the antisense strand. In some embodiments, the one or more abasic nucleosides added to the 3′ end or 5′ end of the antisense strand may be inverted (invAb). In some embodiments, one or more inverted abasic nucleosides may be inserted between the targeting ligand and the nucleobase sequence of the sense strand of the RNAi agent. In some embodiments, the inclusion of one or more inverted abasic nucleosides at or near the terminal end or terminal ends of the antisense strand of an RNAi agent may allow for enhanced activity or other desired properties of an RNAi agent.

[1037] In some embodiments, the modification comprises fluorinated bases. In some embodiments, 1 or more, 2 or more, 3 or more, 4 or more, 5 or more, 6 or more, 7 or more, 8 or more, 9 or more, or 10 or more bases of the sense strand and/or antisense strand of the RNAi agent are fluorinated. In some embodiments, base 1, 2, 3, 4, 5, 6, 7, 8, 9, 10, 11, 12, 13, 14, 15, 16, 17, 18, 19, and/or 20 of the sense strand of the RNAi agent are fluorinated. In some embodiments, bases 7, 9, 10, and 11 of the sense strand of the RNAi agent are fluorinated. In some embodiments, base 1, 2, 3, 4, 5, 6, 7, 8, 9, 10, 11, 12, 13, 14, 15, 16, 17, 18, 19, 20, 21, 22, and/or 23 of the antisense strand of the RNAi agent are fluorinated. In some embodiments, bases 2, 6, 14, and 16 of the antisense strand are fluorinated.

[1038] In some embodiments, the modification comprises 2′-O-methyl (2′-OMe) and/or 2′-deoxy-2′-fluoro (2′-F) ribosugar modifications. In some embodiments, the modification comprises those described in Foster, et al., Molecular Therapy. Vol. 26 No 3 M arch 2018 which is herein incorporated by reference. In some embodiments, all or substantially all of the nucleotides of the RNAi agent are modified nucleotides. A s used herein, an RNAi agent wherein substantially all of the nucleotides present are modified nucleotides is an RNAi agent having four or fewer (i.e., 0, 1, 2, 3, or 4) nucleotides in both the sense strand and the antisense strand being ribonucleotides. As used herein, a sense strand wherein substantially all of the nucleotides present are modified nucleotides is a sense strand having two or fewer (i.e., 0, 1, or 2) nucleotides in the sense strand being ribonucleotides. As used herein, an antisense sense strand wherein substantially all of the nucleotides present are modified nucleotides is an antisense strand having two or fewer (i.e., 0, 1, or 2) nucleotides in the sense strand being ribonucleotides. In some embodiments, one or more nucleotides of an RNAi agent is a ribonucleotide.

[1039] In some embodiments, the modified antisense strand of the RNAi agent comprises a nucleotide sequence of any of the sequences in Table 1. In some embodiments, the modified sense strand of the RNAi agent comprises a nucleotide sequence of any of the sequences in Table 2.

[1040] Among the RNAi agents provided herein, the RNAi agent comprises a modified antisense strand comprising a nucleotide sequence having at least at or about 80%, at or about 81%, at or about 82%, at or about 83%, at or about 84%, at or about 85%, at or about 86%, at or about 87%, at or about 88%, at or about 89%, at or about 90%, at or about 91%, at or about 92%, at or about 93%, at or about 94%, at or about 95%, at or about 96%, at or about 97%, at or about 98%, or at or about 99% sequence identity to the sequences set forth in any of SEQ ID NOs: 193-288 and a modified sense strand comprising a nucleotide sequence having at least at or about 80%, at or about 81%, at or about 82%, at or about 83%, at or about 84%, at or about 85%, at or about 86%, at or about 87%, at or about 88%, at or about 89%, at or about 90%, at or about 91%, at or about 92%, at or about 93%, at or about 94%, at or about 95%, at or about 96%, at or about 97%, at or about 98%, or at or about 99% sequence identity to the sequences set forth in any of SEQ ID NOs: 289-384 or 385-480. Furthermore, among the RNAi agents provided herein, the RNAi agent comprises a modified antisense strand that differs by 1, 2, 3, or 4 nucleotides from an equal length portion of the sequences set forth in any of SEQ ID NOs: 289-384, 385-480, or a subsequence thereof, and a modified sense strand that differs by 1, 2, 3, or 4 nucleotides from an equal length portion of the sequences set forth in any of SEQ ID NOs: 289-384, 385-480, or a subsequence thereof.

[1041] In some embodiments, the modified antisense strand of the RNAi agent comprises a nucleotide sequence of any of SEQ ID NO: 193-288 and the modified sense strand of the RNAi agent comprises a nucleotide sequence of any of SEQ ID NO: 289-384 or 385-480. In some embodiments, the modified antisense and the modified sense strands of the RNAi agent comprise the nucleotide sequences of SEQ ID NOs: 193 and 289, respectively; SEQ ID NOs: 194 and 290, respectively; SEQ ID NOs: 195 and 291, respectively; SEQ ID NOs: 196 and 292, respectively; SEQ ID NOs: 197 and 293, respectively; SEQ ID NOs: 198 and 294, respectively; SEQ ID NOs: 199 and 295, respectively; SEQ ID NOs: 200 and 296, respectively; SEQ ID NOs: 201 and 297, respectively; SEQ ID NOs: 202 and 298, respectively; SEQ ID NOs: 203 and 299, respectively; SEQ ID NOs: 204 and 300, respectively; SEQ ID NOs: 205 and 301, respectively; SEQ ID NOs: 206 and 302, respectively; SEQ ID NOs: 207 and 303, respectively; SEQ ID NOs: 208 and 304, respectively; SEQ ID NOs: 209 and 305, respectively; SEQ ID NOs: 210 and 306, respectively; SEQ ID NOs: 211 and 307, respectively; or SEQ ID NOs: 212 and 308, respectively, or any antisense or sense strand that has at least 80% sequence identity to any of the above sequences, such as at least 80%, 81%, 82%, 83%, 84%, 85%, 86%, 87%, 88%, 89%, 90%, 91%, 92%, 93%, 94%, 95%, 96%, 97%, 98%, or 99% sequence identity thereto, or any antisense or sense stand that differs by 1, 2, 3, or 4 nucleotides from an equal length portion of the sequences of SEQ ID NOs: 193 and 289, respectively; SEQ ID NOs: 194 and 290, respectively; SEQ ID NOs: 195 and 291, respectively; SEQ ID NOs: 196 and 292, respectively; SEQ ID NOs: 197 and 293, respectively; SEQ ID NOs: 198 and 294, respectively; SEQ ID NOs: 199 and 295, respectively; SEQ ID NOs: 200 and 296, respectively; SEQ ID NOs: 201 and 297, respectively; SEQ ID NOs: 202 and 298, respectively; SEQ ID NOs: 203 and 299, respectively; SEQ ID NOs: 204 and 300, respectively; SEQ ID NOs: 205 and 301, respectively; SEQ ID NOs: 206 and 302, respectively; SEQ ID NOs: 207 and 303, respectively; SEQ ID NOs: 208 and 304, respectively; SEQ ID NOs: 209 and 305, respectively; SEQ ID NOs: 210 and 306, respectively; SEQ ID NOs: 211 and 307, respectively; or SEQ ID NOs: 212 and 308, respectively.

[1042] In some embodiments, the modified antisense and the modified sense strands of the RNAi agent comprise the nucleotide sequences of SEQ ID NOs: 213 and 309, respectively; SEQ ID NOs: 214 and 310, respectively; SEQ ID NOs: 215 and 311, respectively; SEQ ID NOs: 216 and 312, respectively; SEQ ID NOs: 217 and 313, respectively; SEQ ID NOs: 218 and 314, respectively; SEQ ID NOs: 219 and 315, respectively; SEQ ID NOs: 220 and 316, respectively; SEQ ID NOs: 221 and 317, respectively; SEQ ID NOs: 222 and 318, respectively; SEQ ID NOs: 223 and 319, respectively; SEQ ID NOs: 224 and 320, respectively; SEQ ID NOs: 225 and 321, respectively; SEQ ID NOs: 226 and 322, respectively; SEQ ID NOs: 227 and 323, respectively; SEQ ID NOs: 228 and 324, respectively; SEQ ID NOs: 229 and 325, respectively; SEQ ID NOs: 230 and 326, respectively; SEQ ID NOs: 231 and 327, respectively; or SEQ ID NOs: 232 and 328, respectively, or any antisense or sense strand that has at least 80% sequence identity to any of the above sequences, such as at least 80%, 81%, 82%, 83%, 84%, 85%, 86%, 87%, 88%, 89%, 90%, 91%, 92%, 93%, 94%, 95%, 96%, 97%, 98%, or 99% sequence identity thereto, or any antisense or sense stand that differs by 1, 2, 3, or 4 nucleotides from an equal length portion of the sequences of SEQ ID NOs: 213 and 309, respectively; SEQ ID NOs: 214 and 310, respectively; SEQ ID NOs: 215 and 311, respectively; SEQ ID NOs: 216 and 312, respectively; SEQ ID NOs: 217 and 313, respectively; SEQ ID NOs: 218 and 314, respectively; SEQ ID NOs: 219 and 315, respectively; SEQ ID NOs: 220 and 316, respectively; SEQ ID NOs: 221 and 317, respectively; SEQ ID NOs: 222 and 318, respectively; SEQ ID NOs: 223 and 319, respectively; SEQ ID NOs: 224 and 320, respectively; SEQ ID NOs: 225 and 321, respectively; SEQ ID NOs: 226 and 322, respectively; SEQ ID NOs: 227 and 323, respectively; SEQ ID NOs: 228 and 324, respectively; SEQ ID NOs: 229 and 325, respectively; SEQ ID NOs: 230 and 326, respectively; SEQ ID NOs: 231 and 327, respectively; or SEQ ID NOs: 232 and 328, respectively.

[1043] In some embodiments, the modified antisense and the modified sense strands of the RNAi agent comprise the nucleotide sequences of SEQ ID NOs: 233 and 329, respectively; SEQ ID NOs: 234 and 330, respectively; SEQ ID NOs: 235 and 331, respectively; SEQ ID NOs: 236 and 332, respectively; SEQ ID NOs: 237 and 333, respectively; SEQ ID NOs: 238 and 334, respectively; SEQ ID NOs: 239 and 335, respectively; SEQ ID NOs: 240 and 336, respectively; SEQ ID NOs: 241 and 337, respectively; SEQ ID NOs: 242 and 338, respectively; SEQ ID NOs: 243 and 339, respectively; SEQ ID NOs: 244 and 340, respectively; SEQ ID NOs: 245 and 341, respectively; SEQ ID NOs: 246 and 342, respectively; SEQ ID NOs: 247 and 343, respectively; SEQ ID NOs: 248 and 344, respectively; SEQ ID NOs: 249 and 345, respectively; SEQ ID NOs: 250 and 346, respectively; SEQ ID NOs: 251 and 347, respectively; or SEQ ID NOs: 252 and 348, respectively, or any antisense or sense strand that has at least 80% sequence identity to any of the above sequences, such as at least 80% sequence identity to any of the above sequences, such as at least 80%, 81%, 82%, 83%, 84%, 85%, 86%, 87%, 88%, 89%, 90%, 91%, 92%, 93%, 94%, 95%, 96%, 97%, 98%, or 99% sequence identity thereto, or any antisense or sense stand that differs by 1, 2, 3, or 4 nucleotides from an equal length portion of the sequences of SEQ ID NOs: 233 and 329, respectively; SEQ ID NOs: 234 and 330, respectively; SEQ ID NOs: 235 and 331, respectively; SEQ ID NOs: 236 and 332, respectively; SEQ ID NOs: 237 and 333, respectively; SEQ ID NOs: 238 and 334, respectively; SEQ ID NOs: 239 and 335, respectively; SEQ ID NOs: 240 and 336, respectively; SEQ ID NOs: 241 and 337, respectively; SEQ ID NOs: 242 and 338, respectively; SEQ ID NOs: 243 and 339, respectively; SEQ ID NOs: 244 and 340, respectively; SEQ ID NOs: 245 and 341, respectively; SEQ ID NOs: 246 and 342, respectively; SEQ ID NOs: 247 and 343, respectively; SEQ ID NOs: 248 and 344, respectively; SEQ ID NOs: 249 and 345, respectively; SEQ ID NOs: 250 and 346, respectively; SEQ ID NOs: 251 and 347, respectively; or SEQ ID NOs: 252 and 348.

[1044] In some embodiments, the modified antisense and the modified sense strands of the RNAi agent comprise the nucleotide sequences of SEQ ID NOs: 253 and 349, respectively; SEQ ID NOs: 254 and 350, respectively; SEQ ID NOs: 255 and 351, respectively; SEQ ID NOs: 256 and 352, respectively; SEQ ID NOs: 257 and 353, respectively; SEQ ID NOs: 258 and 354, respectively; SEQ ID NOs: 259 and 355, respectively; SEQ ID NOs: 260 and 356, respectively; SEQ ID NOs: 261 and 357, respectively; SEQ ID NOs: 262 and 358, respectively; SEQ ID NOs: 263 and 359, respectively; SEQ ID NOs: 264 and 360, respectively; SEQ ID NOs: 265 and 361, respectively; SEQ ID NOs: 266 and 362, respectively; SEQ ID NOs: 267 and 363, respectively; SEQ ID NOs: 268 and 364, respectively; SEQ ID NOs: 269 and 365, respectively; SEQ ID NOs: 270 and 366, respectively; SEQ ID NOs: 271 and 367, respectively; or SEQ ID NOs: 272 and 368, respectively, or any antisense or sense strand that has at least 80% sequence identity to any of the above sequences, such as at least 80%, 81%, 82%, 83%, 84%, 85%, 86%, 87%, 88%, 89%, 90%, 91%, 92%, 93%, 94%, 95%, 96%, 97%, 98%, or 99% sequence identity thereto, or any antisense or sense stand that differs by 1, 2, 3, or 4 nucleotides from an equal length portion of the sequences of SEQ ID NOs: 253 and 349, respectively; SEQ ID NOs: 254 and 350, respectively; SEQ ID NOs: 255 and 351, respectively; SEQ ID NOs: 256 and 352, respectively; SEQ ID NOs: 257 and 353, respectively; SEQ ID NOs: 258 and 354, respectively; SEQ ID NOs: 259 and 355, respectively; SEQ ID NOs: 260 and 356, respectively; SEQ ID NOs: 261 and 357, respectively; SEQ ID NOs: 262 and 358, respectively; SEQ ID NOs: 263 and 359, respectively; SEQ ID NOs: 264 and 360, respectively; SEQ ID NOs: 265 and 361, respectively; SEQ ID NOs: 266 and 362, respectively; SEQ ID NOs: 267 and 363, respectively; SEQ ID NOs: 268 and 364, respectively; SEQ ID NOs: 269 and 365, respectively; SEQ ID NOs: 270 and 366, respectively; SEQ ID NOs: 271 and 367, respectively; or SEQ ID NOs: 272 and 368, respectively.

[1045] In some embodiments, the modified antisense and the modified sense strands of the RNAi agent comprise the nucleotide sequences of SEQ ID NOs: 273 and 369, respectively; SEQ ID NOs: 274 and 370, respectively; SEQ ID NOs: 275 and 371, respectively; SEQ ID NOs: 276 and 372, respectively; SEQ ID NOs: 277 and 373, respectively; SEQ ID NOs: 278 and 374, respectively; SEQ ID NOs: 279 and 375, respectively; SEQ ID NOs: 280 and 376, respectively; SEQ ID NOs: 281 and 377, respectively; SEQ ID NOs: 282 and 378, respectively; SEQ ID NOs: 283 and 379, respectively; SEQ ID NOs: 284 and 380, respectively; SEQ ID NOs: 285 and 381, respectively; SEQ ID NOs: 286 and 382, respectively; SEQ ID NOs: 287 and 383, respectively; or SEQ ID NOs: 288 and 384, respectively, or any antisense or sense strand that has at least 80% sequence identity to any of the above sequences, such as at least 80%, 81%, 82%, 83%, 84%, 85%, 86%, 87%, 88%, 89%, 90%, 91%, 92%, 93%, 94%, 95%, 96%, 97%, 98%, or 99% sequence identity thereto, or any antisense or sense stand that differs by 1, 2, 3, or 4 nucleotides from an equal length portion of the sequences of SEQ ID NOs: 273 and 369, respectively; SEQ ID NOs: 274 and 370, respectively; SEQ ID NOs: 275 and 371, respectively; SEQ ID NOs: 276 and 372, respectively; SEQ ID NOs: 277 and 373, respectively; SEQ ID NOs: 278 and 374, respectively; SEQ ID NOs: 279 and 375, respectively; SEQ ID NOs: 280 and 376, respectively; SEQ ID NOs: 281 and 377, respectively; SEQ ID NOs: 282 and 378, respectively; SEQ ID NOs: 283 and 379, respectively; SEQ ID NOs: 284 and 380, respectively; SEQ ID NOs: 285 and 381, respectively; SEQ ID NOs: 286 and 382, respectively; SEQ ID NOs: 287 and 383, respectively; or SEQ ID NOs: 288 and 384, respectively.

[1046] In some embodiments, the modified antisense and the modified sense strands of the RNAi agent comprise the nucleotide sequences of SEQ ID NOs: 193 and 385, respectively; SEQ ID NOs: 194 and 386, respectively; SEQ ID NOs: 195 and 387, respectively; SEQ ID NOs: 196 and 388, respectively; SEQ ID NOs: 197 and 389, respectively; SEQ ID NOs: 198 and 390, respectively; SEQ ID NOs: 199 and 391, respectively; SEQ ID NOs: 200 and 392, respectively; SEQ ID NOs: 201 and 393, respectively; SEQ ID NOs: 202 and 394, respectively; SEQ ID NOs: 203 and 395, respectively; SEQ ID NOs: 204 and 396, respectively; SEQ ID NOs: 205 and 397, respectively; SEQ ID NOs: 206 and 398, respectively; SEQ ID NOs: 207 and 399, respectively; SEQ ID NOs: 208 and 400, respectively; SEQ ID NOs: 209 and 401, respectively; SEQ ID NOs: 210 and 402, respectively; SEQ ID NOs: 211 and 403, respectively; or SEQ ID NOs: 212 and 404, respectively, or any antisense or sense strand that has at least 80% sequence identity to any of the above sequences, such as at least 80%, 81%, 82%, 83%, 84%, 85%, 86%, 87%, 88%, 89%, 90%, 91%, 92%, 93%, 94%, 95%, 96%, 97%, 98%, or 99% sequence identity thereto, or any antisense or sense stand that differs by 1, 2, 3, or 4 nucleotides from an equal length portion of the sequences of SEQ ID NOs: 193 and 385, respectively; SEQ ID NOs: 194 and 386, respectively; SEQ ID NOs: 195 and 387, respectively; SEQ ID NOs: 196 and 388, respectively; SEQ ID NOs: 197 and 389, respectively; SEQ ID NOs: 198 and 390, respectively; SEQ ID NOs: 199 and 391, respectively; SEQ ID NOs: 200 and 392, respectively; SEQ ID NOs: 201 and 393, respectively; SEQ ID NOs: 202 and 394, respectively; SEQ ID NOs: 203 and 395, respectively; SEQ ID NOs: 204 and 396, respectively; SEQ ID NOs: 205 and 397, respectively; SEQ ID NOs: 206 and 398, respectively; SEQ ID NOs: 207 and 399, respectively; SEQ ID NOs: 208 and 400, respectively; SEQ ID NOs: 209 and 401, respectively; SEQ ID NOs: 210 and 402, respectively; SEQ ID NOs: 211 and 403, respectively; or SEQ ID NOs: 212 and 404, respectively.

[1047] In some embodiments, the modified antisense and the modified sense strands of the RNAi agent comprise the nucleotide sequences of SEQ ID NOs: 213 and 405, respectively; SEQ ID NOs: 214 and 406, respectively; SEQ ID NOs: 215 and 407, respectively; SEQ ID NOs: 216 and 408, respectively; SEQ ID NOs: 217 and 409, respectively; SEQ ID NOs: 218 and 410, respectively; SEQ ID NOs: 219 and 411, respectively; SEQ ID NOs: 220 and 412, respectively; SEQ ID NOs: 221 and 413, respectively; SEQ ID NOs: 222 and 414, respectively; SEQ ID NOs: 223 and 415, respectively; SEQ ID NOs: 224 and 416, respectively; SEQ ID NOs: 225 and 417, respectively; SEQ ID NOs: 226 and 418, respectively; SEQ ID NOs: 227 and 419, respectively; SEQ ID NOs: 228 and 420, respectively; SEQ ID NOs: 229 and 421, respectively; SEQ ID NOs: 230 and 422, respectively; SEQ ID NOs: 231 and 423, respectively; or SEQ ID NOs: 232 and 424, respectively, or any antisense or sense strand that has at least 80% sequence identity to any of the above sequences, such as at least 80%, 81%, 82%, 83%, 84%, 85%, 86%, 87%, 88%, 89%, 90%, 91%, 92%, 93%, 94%, 95%, 96%, 97%, 98%, or 99% sequence identity thereto, or any antisense or sense stand that differs by 1, 2, 3, or 4 nucleotides from an equal length portion of the sequences of SEQ ID NOs: 213 and 405, respectively; SEQ ID NOs: 214 and 406, respectively; SEQ ID NOs: 215 and 407, respectively; SEQ ID NOs: 216 and 408, respectively; SEQ ID NOs: 217 and 409, respectively; SEQ ID NOs: 218 and 410, respectively; SEQ ID NOs: 219 and 411, respectively; SEQ ID NOs: 220 and 412, respectively; SEQ ID NOs: 221 and 413, respectively; SEQ ID NOs: 222 and 414, respectively; SEQ ID NOs: 223 and 415, respectively; SEQ ID NOs: 224 and 416, respectively; SEQ ID NOs: 225 and 417, respectively; SEQ ID NOs: 226 and 418, respectively; SEQ ID NOs: 227 and 419, respectively; SEQ ID NOs: 228 and 420, respectively; SEQ ID NOs: 229 and 421, respectively; SEQ ID NOs: 230 and 422, respectively; SEQ ID NOs: 231 and 423, respectively; or SEQ ID NOs: 232 and 424, respectively.

[1048] In some embodiments, the modified antisense and the modified sense strands of the RNAi agent comprise the nucleotide sequences of SEQ ID NOs: 233 and 425, respectively; SEQ ID NOs: 234 and 426, respectively; SEQ ID NOs: 235 and 427, respectively; SEQ ID NOs: 236 and 428, respectively; SEQ ID NOs: 237 and 429, respectively; SEQ ID NOs: 238 and 430, respectively; SEQ ID NOs: 239 and 431, respectively; SEQ ID NOs: 240 and 432, respectively; SEQ ID NOs: 241 and 433, respectively; SEQ ID NOs: 242 and 434, respectively; SEQ ID NOs: 243 and 435, respectively; SEQ ID NOs: 244 and 436, respectively; SEQ ID NOs: 245 and 437, respectively; SEQ ID NOs: 246 and 438, respectively; SEQ ID NOs: 247 and 439, respectively; SEQ ID NOs: 248 and 440, respectively; SEQ ID NOs: 249 and 441, respectively; SEQ ID NOs: 250 and 442, respectively; SEQ ID NOs: 251 and 443, respectively; or SEQ ID NOs: 252 and 444, respectively, or any antisense or sense strand that has at least 80% sequence identity to any of the above sequences, such as at least 80% sequence identity to any of the above sequences, such as at least 80%, 81%, 82%, 83%, 84%, 85%, 86%, 87%, 88%, 89%, 90%, 91%, 92%, 93%, 94%, 95%, 96%, 97%, 98%, or 99% sequence identity thereto, or any antisense or sense stand that differs by 1, 2, 3, or 4 nucleotides from an equal length portion of the sequences of SEQ ID NOs: 233 and 425, respectively; SEQ ID NOs: 234 and 426, respectively; SEQ ID NOs: 235 and 427, respectively; SEQ ID NOs: 236 and 428, respectively; SEQ ID NOs: 237 and 429, respectively; SEQ ID NOs: 238 and 430, respectively; SEQ ID NOs: 239 and 431, respectively; SEQ ID NOs: 240 and 432, respectively; SEQ ID NOs: 241 and 433, respectively; SEQ ID NOs: 242 and 434, respectively; SEQ ID NOs: 243 and 435, respectively; SEQ ID NOs: 244 and 436, respectively; SEQ ID NOs: 245 and 437, respectively; SEQ ID NOs: 246 and 438, respectively; SEQ ID NOs: 247 and 439, respectively; SEQ ID NOs: 248 and 440, respectively; SEQ ID NOs: 249 and 441, respectively; SEQ ID NOs: 250 and 442, respectively; SEQ ID NOs: 251 and 443, respectively; or SEQ ID NOs: 252 and 444.

[1049] In some embodiments, the modified antisense and the modified sense strands of the RNAi agent comprise the nucleotide sequences of SEQ ID NOs: 253 and 445, respectively; SEQ ID NOs: 254 and 446, respectively; SEQ ID NOs: 255 and 447, respectively; SEQ ID NOs: 256 and 448, respectively; SEQ ID NOs: 257 and 449, respectively; SEQ ID NOs: 258 and 450, respectively; SEQ ID NOs: 259 and 451, respectively; SEQ ID NOs: 260 and 452, respectively; SEQ ID NOs: 261 and 453, respectively; SEQ ID NOs: 262 and 454, respectively; SEQ ID NOs: 263 and 455, respectively; SEQ ID NOs: 264 and 456, respectively; SEQ ID NOs: 265 and 457, respectively; SEQ ID NOs: 266 and 458, respectively; SEQ ID NOs: 267 and 459, respectively; SEQ ID NOs: 268 and 460, respectively; SEQ ID NOs: 269 and 461, respectively; SEQ ID NOs: 270 and 462, respectively; SEQ ID NOs: 271 and 463, respectively; or SEQ ID NOs: 272 and 464, respectively, or any antisense or sense strand that has at least 80% sequence identity to any of the above sequences, such as at least 80%, 81%, 82%, 83%, 84%, 85%, 86%, 87%, 88%, 89%, 90%, 91%, 92%, 93%, 94%, 95%, 96%, 97%, 98%, or 99% sequence identity thereto, or any antisense or sense stand that differs by 1, 2, 3, or 4 nucleotides from an equal length portion of the sequences of SEQ ID NOs: 253 and 445, respectively; SEQ ID NOs: 254 and 446, respectively; SEQ ID NOs: 255 and 447, respectively; SEQ ID NOs: 256 and 448, respectively; SEQ ID NOs: 257 and 449, respectively; SEQ ID NOs: 258 and 450, respectively; SEQ ID NOs: 259 and 451, respectively; SEQ ID NOs: 260 and 452, respectively; SEQ ID NOs: 261 and 453, respectively; SEQ ID NOs: 262 and 454, respectively; SEQ ID NOs: 263 and 455, respectively; SEQ ID NOs: 264 and 456, respectively; SEQ ID NOs: 265 and 457, respectively; SEQ ID NOs: 266 and 458, respectively; SEQ ID NOs: 267 and 459, respectively; SEQ ID NOs: 268 and 460, respectively; SEQ ID NOs: 269 and 461, respectively; SEQ ID NOs: 270 and 462, respectively; SEQ ID NOs: 271 and 463, respectively; or SEQ ID NOs: 272 and 464, respectively.

[1050] In some embodiments, the modified antisense and the modified sense strands of the RNAi agent comprise the nucleotide sequences of SEQ ID NOs: 273 and 465, respectively; SEQ ID NOs: 274 and 466, respectively; SEQ ID NOs: 275 and 467, respectively; SEQ ID NOs: 276 and 468, respectively; SEQ ID NOs: 277 and 469, respectively; SEQ ID NOs: 278 and 470, respectively; SEQ ID NOs: 279 and 471, respectively; SEQ ID NOs: 280 and 472, respectively; SEQ ID NOs: 281 and 473, respectively; SEQ ID NOs: 282 and 474, respectively; SEQ ID NOs: 283 and 475, respectively; SEQ ID NOs: 284 and 476, respectively; SEQ ID NOs: 285 and 477, respectively; SEQ ID NOs: 286 and 478, respectively; SEQ ID NOs: 287 and 479, respectively; or SEQ ID NOs: 288 and 480, respectively, or any antisense or sense strand that has at least 80% sequence identity to any of the above sequences, such as at least 80%, 81%, 82%, 83%, 84%, 85%, 86%, 87%, 88%, 89%, 90%, 91%, 92%, 93%, 94%, 95%, 96%, 97%, 98%, or 99% sequence identity thereto, or any antisense or sense stand that differs by 1, 2, 3, or 4 nucleotides from an equal length portion of the sequences of SEQ ID NOs: 273 and 465, respectively; SEQ ID NOs: 274 and 466, respectively; SEQ ID NOs: 275 and 467, respectively; SEQ ID NOs: 276 and 468, respectively; SEQ ID NOs: 277 and 469, respectively; SEQ ID NOs: 278 and 470, respectively; SEQ ID NOs: 279 and 471, respectively; SEQ ID NOs: 280 and 472, respectively; SEQ ID NOs: 281 and 473, respectively; SEQ ID NOs: 282 and 474, respectively; SEQ ID NOs: 283 and 475, respectively; SEQ ID NOs: 284 and 476, respectively; SEQ ID NOs: 285 and 477, respectively; SEQ ID NOs: 286 and 478, respectively; SEQ ID NOs: 287 and 479, respectively; or SEQ ID NOs: 288 and 480, respectively.

[1051] In some embodiments, the RNAi agent is prepared or provided as a salt, mixed salt, or a free-acid. In some embodiments, the RNAi agent is prepared as a sodium salt. Such forms are within the scope of the embodiments disclosed herein.

[1052] In some embodiments, the GCK RNAi agent comprises a modified antisense strand and a modified sense strand having the nucleotide sequences of any of the modified antisense strand and/or modified sense strand nucleotide sequences of any of the duplexes of Table 3. In some embodiments, the duplexes of shown in Table 3 and further comprises an asialoglycoprotein receptor ligand targeting group. In some embodiments, the GCK RNAi agent comprises any of the duplexes of Table 3.

### B. Modified Internucleoside Linkages and Modified Sugar-Phosphate Backbone

[1053] In some embodiments, one or more nucleotides of the RNAi agent are linked by non-standard internucleoside linkages or sugar-phosphate backbones (i.e., modified internucleoside linkages or modified backbones). Although some modifications to standard linkages or backbones can occur naturally, many synthetic modifications in the disclosed oligonucleotides are not found in the disclosed oligonucleotides in nature. The term “synthetically modified” herein refers to modifications not found in nature. In some embodiments, a modified internucleoside linkage is a non-phosphate-containing covalent internucleoside linkage. Modified internucleoside linkages or backbones include, but are not limited to, 5′-phosphorothioate groups (represented herein as a lower case “s”), chiral phosphorothioates, thiophosphates, phosphorodithioates, phosphotriesters, aminoalkyl-phosphotriesters, alkyl phosphonates (e.g., methyl phosphonates or 3′-alkylene phosphonates), chiral phosphonates, phosphinates, phosphoramidates (e.g., 3′-amino phosphoramidate, aminoalkylphosphoramidates, or thionophosphoramidates), thionoalkyl-phosphonates, thionoalkylphosphotriesters, morpholino linkages, boranophosphates having normal 3′-5′ linkages, 2′-5′ linked analogs of boranophosphates, or boranophosphates having inverted polarity wherein the adjacent pairs of nucleoside units are linked 3′-5′ to 5′-3′ or 2′-5′ to 5′-2′. In some embodiments, a modified internucleoside linkage or backbone lacks a phosphorus atom. Modified internucleoside linkages lacking a phosphorus atom include, but are not limited to, short chain alkyl or cycloalkyl inter-sugar linkages, mixed heteroatom and alkyl or cycloalkyl inter-sugar linkages, or one or more short chain heteroatomic or heterocyclic inter-sugar linkages. In some embodiments, modified internucleoside backbones include, but are not limited to, siloxane backbones, sulfide backbones, sulfoxide backbones, sulfone backbones, formacetyl and thioformacetyl backbones, methylene formacetyl and thioformacetyl backbones, alkene-containing backbones, sulfamate backbones, methyleneimino and methylenehydrazino backbones, sulfonate and sulfonamide backbones, amide backbones, and other backbones having mixed N, O, S, and CH₂ components.

[1054] In some embodiments, the first and/or second internucleoside linkages of the sense strand and/or the first and/or second internuculeoside linkages of the antisense strand are modified (e.g., phosphorothioate) linkages. In some embodiments, the final and/or penultimate internucleoside linkages of the sense strand and/or the final and/or penultimate internucleoside linkages of the antisense strand are modified (e.g., phosphorothioate) linkages.

[1055] In some embodiments, a sense strand of the RNAi agent comprises 1, 2, 3, 4, 5, or 6 phosphorothioate linkages, an antisense strand of the RNAi agent comprises 1, 2, 3, 4, 5, or 6 phosphorothioate linkages, or both the sense strand and the antisense strand independently comprise 1, 2, 3, 4, 5, or 6 phosphorothioate linkages. In some embodiments, a sense strand of the RNAi agent comprises 1, 2, 3, or 4 phosphorothioate linkages, an antisense strand of the RNAi agent comprises 1, 2, 3, or 4 phosphorothioate linkages, or both the sense strand and the antisense strand independently comprise 1, 2, 3, or 4 phosphorothioate linkages.

[1056] In some embodiments, the RNAi agent sense strand comprises at least two phosphorothioate internucleoside linkages. In some embodiments, the at least two phosphorothioate internucleoside linkages are between the nucleotides at positions 1-3 from the 3′ end of the sense strand. In some embodiments, the at least two phosphorothioate internucleoside linkages are between the nucleotides at positions 1-3, 2-4, 3-5, 4-6, 4-5, or 6-8 from the 5′ end of the sense strand. In some embodiments, the at least two phosphorothioate internucleoside linkages are following bases 1, 2, 19, and 20 of the sense strand. In some embodiments, the RNAi agent antisense strand comprises four phosphorothioate internucleoside linkages. In some embodiments, the four phosphorothioate internucleoside linkages are between the nucleotides at positions 1-3 from the 5′ end of the sense strand and between the nucleotides at positions 19-21, 20-22, 21-23, 22-24, 23-25, or 24-26 from the 5′ end. In some embodiments, the four phosphorothioate internucleoside linkages are following bases 1, 2, 21, and 22 of the antisense strand. In some embodiments, the RNAi agent comprises at least two phosphorothioate internucleoside linkages in the sense strand and three or four phosphorothioate internucleoside linkages in the antisense strand. In some embodiments, the RNAi agent contains one or more modified nucleotides and one or more modified internucleoside linkages. In some embodiments, a 2′-modified nucleoside is combined with modified internucleoside linkage.

[1057] Various implementations provide a modified oligonucleotide having 12 to 30 or 12 to 50 linked nucleosides. The modified oligonucleotide includes at least one synthetically modified internucleoside linkage or at least one synthetically modified sugar-phosphate backbone. The modified oligonucleotide has a nucleobase sequence including at least 12, at least 13, at least 14, at least 15, at least 16, at least 17, at least 18, at least 19, at least 20, at least 21, at least 22, at least 23, at least 24, or at least 25 contiguous nucleobases complementary to an equal length portion of SEQ ID NO: 481 (GCK).

[1058] The modified oligonucleotides described herein encompass a broad range of oligonucleotide-based therapeutics. These include, but are not limited to, small interfering RNA (siRNA), small activating RNA (saRNA), antisense oligonucleotides (ASO), regulatory oligonucleotides, miRNA mimics and inhibitors, ribozymes, DNAzymes, splice-switching oligonucleotides (SSOs), decoy oligonucleotides, aptamers, DNA triplex-forming oligonucleotides (TFOs), etc.

[1059] Small activating RNA (saRNA) are short double-stranded RNA molecules designed to upregulate gene expression by targeting promoter regions or enhancer elements. Modifications similar to those used in siRNA can be applied to saRNA to enhance their stability and targeting efficacy, ensuring prolonged activation of gene expression.

[1060] Antisense oligonucleotides (ASO) are single-stranded DNA or RNA sequences designed to bind complementary mRNA transcripts, thereby blocking translation or promoting degradation through RNase H activity. ASOs often include modifications such as phosphorothioate backbones, 2′-O-methyl or 2′-O-methoxyethyl sugar modifications, and incorporation of L NAs to improve resistance to nucleases and increase binding affinity.

[1061] MicroRNA (miRNA) mimics are synthetic oligonucleotides designed to mimic endogenous miRNAs—small, non-coding RNA molecules typically 19-25 nucleotides in length that play a critical role in regulating gene expression. miRNA mimics can restore the function of miRNAs that are downregulated in certain diseases such as cancer.

[1062] MicroRNA inhibitors (antagomirs) are chemically modified, single-stranded oligonucleotides designed to bind and inhibit endogenous miRNAs. They can be used to upregulate target gene expression by blocking miRNA function. Common modifications include locked nucleic acids (LNA), 2′-O-methyl, and phosphorothioate linkages to enhance stability and binding affinity.

[1063] Ribozymes are RNA molecules with catalytic activity, capable of cleaving specific RNA sequences. Engineered ribozymes can be designed to target and degrade pathogenic mRNAs, offering a therapeutic avenue for diseases caused by aberrant gene expression.

[1064] DNAzymes are DNA oligonucleotides with catalytic functions similar to ribozymes. DNAzymes can be designed to cleave specific RNA sequences, providing a potential therapeutic strategy for inactivating harmful mRNA transcripts. Chemical modifications such as phosphorothioate backbones can improve their stability and efficacy.

[1065] Splice-switching oligonucleotides (SSOs) are designed to modulate pre-mRNA splicing, allowing for the correction of aberrant splicing patterns or the exclusion of deleterious exons. By binding to splicing enhancers or silencers, SSOs can restore the expression of functional proteins. Modified backbones such as phosphorodiamidate morpholino oligomers (PMOs) and 2′-O-methoxyethyl modifications are often used to improve their pharmacological properties.

[1066] Decoy oligonucleotides are designed to mimic specific regulatory DNA or RNA sequences, competitively binding to transcription factors, RNA-binding proteins, or other regulatory molecules. This can inhibit the interaction of these regulatory molecules with their natural targets, thereby modulating gene expression. These decoys often incorporate modifications to increase their stability and binding affinity.

[1067] A ptamers are short nucleic acid sequences that can fold into specific three-dimensional shapes, allowing them to bind their target molecules with high specificity and affinity, akin to antibodies. A ptamers can be used as therapeutic agents to neutralize proteins, interfere with protein-protein interactions, or deliver drugs to specific cells. Modifications such as polyethylene glycol (PEG) conjugation and nucleotide analogs can enhance their stability and prolong their activity in biological systems.

[1068] DNA triplex-forming oligonucleotides (TFOs) bind to the major groove of double-stranded DNA, forming a triple-helix structure. This can be used to modulate gene expression by blocking the binding of transcription factors or other DNA-binding proteins, thereby regulating the transcription of target genes. TFOs often include modifications such as 2′-O-methyl or locked nucleic acids to enhance their stability and binding specificity.

[1069] Additionally, the modified oligonucleotides are envisioned to include other emerging oligonucleotide-based therapeutics not enumerated above but have the same recited features. Synthetic oligonucleotides are versatile in treating a wide array of diseases. With various chemical modifications, these oligos can betailored to improve their stability, specificity, and therapeutic efficacy in precision medicine and targeted therapies.

### C. Targeting Groups

[1070] In some embodiments, the RNAi agent as provided herein is conjugated to one or more non-nucleotide groups including, but not limited to a targeting group, linking group, delivery polymer, or a delivery vehicle. In some embodiments, the targeting group (e.g. targeting ligand) is conjugated to the RNAi agent. The non-nucleotide group can enhance targeting, delivery or attachment of the RNAi agent. Examples of targeting groups are provided in Table 4. The targeting group (e.g. targeting ligand) can be covalently linked to the 3′ and/or 5′ end of either the sense strand and/or the antisense strand. In some implementations, the targeting group is covalently linked to the 3′ end of the sense strand.

[1071] In some embodiments, the RNAi agent includes a non-nucleotide group linked to the 3′ and/or 5′ end of the sense strand and/or the antisense strand. In some embodiments, a non-nucleotide group is linked to the 3′ end of the RNAi agent sense strand. In various embodiments, the non-nucleotide group includes a targeting group or targeting ligand. A non-nucleotide group may be linked directly or indirectly to the RNAi agent via a linker/linking group. In some embodiments, a non-nucleotide group is linked to the RNAi agent via a labile, cleavable, or reversible bond or linker. Exemplary targeting groups (e.g., ligands) are disclosed in U.S. Pat. No. 9,771,591, which is incorporated herein in its entirety. In some embodiments, the RNAi agent includes a non-nucleotide group linked to an internal nucleotide of the sense strand and/or the antisense strand, the internal nucleotide being any nucleotide between the 3′ end and the 5′ end of a strand. In some embodiments, the non-nucleotide group is covalently linked to a sugar or a base of the internal nucleotide.

[1072] In some embodiments, a non-nucleotide group enhances the pharmacokinetic or biodistribution properties of the RNAi agent or conjugate to which it is attached to improve cell- or tissue-specific distribution and cell-specific uptake of the conjugate. In some embodiments, a non-nucleotide group enhances endocytosis of the RNAi agent. Such moieties include but are not limited to lipid moieties such as a cholesterol moiety (Letsinger et al., (1989) Proc. Natl. Acid. Sci. USA, 86: 6553-6556), cholic acid (Manoharan et al., (1994) Biorg. Med. Chem. L et., 4:1053-1060), a thioether, e.g., beryl-S-tritylthiol (Manoharan et al., (1992) Ann. N.Y. Acad. Sci., 660:306-309; Manoharan et al., (1993) Biorg. Med. Chem. Let., 3:2765-2770), a thiocholesterol (Oberhauser et al., (1992) Nucl. Acids Res., 20:533-538), an aliphatic chain, e.g., dodecandiol or undecyl residues (Saison-Behmoaras et al., (1991) EMBO J, 10:1111-1118; Kabanov et al., (1990) FEBS Lett., 259:327-330; Svinarchuk et al., (1993) Biochimie, 75:49-54), a phospholipid, e.g., di-hexadecyl-rac-glycerol or triethyl-ammonium 1,2-di-O-hexadecyl-rac-glycero-3-phosphonate (Manoharan et al., (1995) Tetrahedron Lett., 36:3651-3654; Shea et al., (1990) Nucl. Acids Res., 18:3777-3783), a polyamine or a polyethylene glycol chain (Manoharan et al., (1995) Nucleosides & Nucleotides, 14:969-973), or adamantane acetic acid (Manoharan et al., (1995) Tetrahedron Lett., 36:3651-3654), a palmityl moiety (Mishra et al., (1995) Biochim. Biophys. Acta, 1264:229-237), or an octadecylamine or hexylamino-carbonyloxycholesterol moiety (Crooke et al., (1996) J. Pharmacol. Exp. Ther., 277:923-937).

[1073] Targeting groups or targeting moieties enhance the pharmacokinetic or biodistribution properties of a conjugate to which they are attached to improve cell-specific distribution and cell-specific uptake of the conjugate. In some embodiments, the targeting group provides an enhanced affinity for a selected target, e.g., molecule, cell or cell type, compartment, e.g., a cellular or organ compartment, tissue, organ or region of the body, as, e.g., compared to a species absent such a targeting group. In some embodiments, the targeting group will not take part in duplex pairing in a duplexed nucleic acid.

[1074] Targeting groups can include a naturally occurring substance, such as a protein (e.g., human serum albumin (HSA), low-density lipoprotein (LDL), or globulin); carbohydrate (e.g., a dextran, pullulan, chitin, chitosan, inulin, cyclodextrin, N-acetylglucosamine, N-acetylgalactosamine or hyaluronic acid); or a lipid. The ligand can also be a recombinant or synthetic molecule, such as a synthetic polymer, e.g., a synthetic polyamino acid. Examples of polyamino acids include polyamino acid is a polylysine (PLL), poly L-aspartic acid, poly L-glutamic acid, styrene-maleic acid anhydride copolymer, poly(L-lactide-co-glycolied) copolymer, divinyl ether-maleic anhydride copolymer, N-(2-hydroxypropyl)methacrylamide copolymer (HMPA), polyethylene glycol (PEG), polyvinyl alcohol (PVA), polyurethane, poly(2-ethylacryllic acid), N-isopropylacrylamide polymers, or polyphosphazine. Example of polyamines include: polyethylenimine, polylysine (PLL), spermine, spermidine, polyamine, pseudopeptide-polyamine, peptidomimetic polyamine, dendrimer polyamine, arginine, amidine, protamine, cationic lipid, cationic porphyrin, quaternary salt of a polyamine, or an alpha helical peptide.

[1075] A targeting group can be monovalent, divalent, trivalent, tetravalent, or have higher valency. Representative targeting groups include, without limitation, compounds with affinity to cell surface molecule, cell receptor ligands, hapten, antibodies, monoclonal antibodies, antibody fragments, and antibody mimics with affinity to cell surface molecules. In some embodiments, the targeting group is a thyrotropin, melanotropin, lectin, glycoprotein, surfactant protein A, Mucin carbohydrate, multivalent lactose, multivalent galactose, N-acetyl-galactosamine, N-acetyl-gulucosamine multivalent mannose, multivalent fucose, glycosylated polyaminoacids, multivalent galactose, transferrin, bisphosphonate, polyglutamate, polyaspartate, a lipid, cholesterol, a steroid, bile acid, folate, vitamin B12, vitamin A, biotin, or an RGD peptide or RGD peptide mimetic.

[1076] Targeting groups can be proteins, e.g., glycoproteins, or peptides, e.g., molecules having a specific affinity for a co-ligand, or antibodies e.g., an antibody, that binds to a specified cell type such as a hepatic cell. Targeting groups can also include hormones and hormone receptors. They can also include non-peptidic species, such as lipids, lectins, carbohydrates, vitamins, cofactors, multivalent lactose, multivalent galactose, N-acetyl-galactosamine, N-acetyl-gulucosamine multivalent mannose, or multivalent fucose. The ligand can be, for example, a lipopolysaccharide, an activator of p38 MAP kinase, or an activator of NF-κB.

[1077] The targeting group can be a substance, e.g., a drug, which can increase the uptake of the iRNA agent into the cell, for example, by disrupting the cell's cytoskeleton, e.g., by disrupting the cell's microtubules, microfilaments, and/or intermediate filaments. The drug can be, for example, taxon, vincristine, vinblastine, cytochalasin, nocodazole, japlakinolide, latrunculin A, phalloidin, swinholide A, indanocine, or myoservin.

[1078] In some embodiments, a targeting group is linked to the RNAi agent using a linker, such as a PEG linker or one, two, or three abasic and/or ribitol (abasic ribose) groups. In some embodiments, a targeting group comprises a galactose derivative cluster.

[1079] The RNAi agent described herein may be synthesized having a reactive group, such as an amine group, at the 5′-terminus. The reactive group may be used to subsequently attach a targeting moiety using methods typical in the art.

[1080] In some embodiments, a targeting group comprises an asialoglycoprotein receptor ligand. In some embodiments, an asialoglycoprotein receptor ligand includes or comprises of one or more galactose derivatives. As used herein, the term galactose derivative includes both galactose and derivatives of galactose having affinity for the asialoglycoprotein receptor that is equal to or greater than that of galactose. Galactose derivatives include, but are not limited to, galactose, galactosamine, N-formylgalactosamine, N-acetyl-galactosamine, N propionyl-galactosamine, N-n-butanoyl-galactosamine, and N-iso-butanoylgalactos-amine (see for example: Iobst, S. T. and Drickamer, K. J.B.C. 1996, 271, 6686). Galactose derivatives, and clusters of galactose derivatives, that are useful for in vivo targeting of oligonucleotides and other molecules to the liver are known in the art (see, for example, Baenziger and Fiete, 1980, Cell, 22, 611-620; Connolly et al., 1982, J. Biol. Chem., 257, 939-945). Galactose derivatives have been used to target molecules to hepatocytes in vivo through their binding to the asialoglycoprotein receptor (ASGPr) expressed on the surface of hepatocytes. Binding of ASGPr ligands to the ASGPr(s) facilitates cell-specific targeting to hepatocytes and endocytosis of the molecule into hepatocytes. ASGPr ligands can be monomeric (e.g., having a single galactose derivative) or multimeric (e.g., having multiple galactose derivatives). The galactose derivative or galactose derivative cluster may be attached to the 3′ or 5′ end of the RNAi polynucleotide using methods known in the art. The preparation of targeting groups, such as galactose derivative clusters, is described in, for example, U.S. Patent Publication Nos. US20180064819A 1 and US20170253875A 1, the contents of each of which are incorporated herein in their entirety.

[1081] In some embodiments, the RNAi agent are targeted to hepatocytes by using conjugated targeting ligands.

[1082] In some embodiments, a galactose derivative cluster comprises a molecule having two to four terminal galactose derivatives. A terminal galactose derivative is attached to a molecule through its C-1 carbon. In some embodiments, the galactose derivative cluster is a galactose derivative trimer (also referred to as tri-antennary galactose derivative or tri-valent galactose derivative). In some embodiments, the galactose derivative cluster comprises N-acetyl-galactosamines. In some embodiments, the galactose derivative cluster comprises three N-acetyl-galactosamines. In some embodiments, the galactose derivative cluster is a galactose derivative tetramer (also referred to as tetra-antennary galactose derivative or tetra-valent galactose derivative). In some embodiments, the galactose derivative cluster comprises four N-acetyl-galactosamines.

[1083] In some embodiments, a galactose derivative trimer contains three galactose derivatives, each linked to a central branch point. As used herein, a galactose derivative tetramer contains four galactose derivatives, each linked to a central branch point. The galactose derivatives can be attached to the central branch point through the C-1 carbons of the saccharides. In some embodiments, the galactose derivatives are linked to the branch point via linkers or spacers. In some embodiments, the linker or spacer is a flexible hydrophilic spacer, such as a PEG group (see, for example, U.S. Pat. No. 5,885,968; Biessen et al. J. Med. Chem. 1995 Vol. 39 p. 1538-1546). In some embodiments, the PEG spacer is a PEG₃ spacer. The branch point can be any small molecule which permits attachment of three galactose derivatives and further permits attachment of the branch point to the RNAi agent. A n example of branch point group is a di-lysine or di-glutamate. Attachment of the branch point to the RNAi agent can occur through a linker or spacer. In some embodiments, the linker or spacer comprises a flexible hydrophilic spacer, such as, but not limited to, a PEG spacer. In some embodiments, the linker comprises a rigid linker, such as a cyclic group. In some embodiments, a galactose derivative comprises or consists of N-acetyl-galactosamine. In some embodiments, the galactose derivative cluster is comprised of a galactose derivative tetramer, which can be, for example, an N-acetyl-galactosamine tetramer. In some embodiments, the galactose derivative cluster is comprised of a galactose derivative trimer, which can be, for example, an N-acetyl-galactosamine trimer.

[1084] Targeting ligands include, but are not limited to, (PAZ), (NAG13), (NAG13)s, (NAG18), (NAG18)s, (NAG24), (NAG24)s, (NAG25), (NAG25)s, (NAG26), (NAG26)s, (NAG27), (NAG27)s, (NAG28), (NAG28)s, (NAG29), (NAG29)s, (NAG30), (NAG30)s, (NAG31), (NAG31)s, (NAG32), (NAG32)s, (NAG33), (NAG33)s, (NAG34), (NAG34)s, (NAG35), (NAG35)s, (NAG36), (NAG36)s, (NAG37), (NAG37)s, (NAG38), (NAG38)s, (NAG39), and (NAG39)s. Other targeting groups, including galactose cluster targeting ligands, are known in the art.

[1085] In a particularly useful implementation, the targeting ligand has a structure according to Formula I:

[chemical structure]

[1086] See WO 2022/271806 A 1, which is incorporated herein by reference. Formula I may have modifications or additions or deletions of one or more atoms within Formula I, or the compounds may comprise additional moieties. For example, one or more alkyl chains in Formula I may be extended or shortened, or the compound comprising Formula I may further comprise one or more RNAi agents as described herein. The compounds herein comprising Formula I are useful for delivering one or more described RNAi agents to a cell that has a receptor for one or more N-acetylgalactosamine (GalNAc, also N-GalNAc or galnac) moieties, such as the asialoglycoprotein receptor (ASPGR) that typically binds three GalNAc moieties. Accordingly, the compounds comprising Formula I herein may be used to preferentially bind to liver cells that express ASPGR, thereby facilitating entry of the compounds into liver cells. As ASPGR is also present on adipose tissue, the compounds of Formula I thus may be used to deliver RNAi agents to fat cells that express ASPGR.

[1087] In one embodiment of an RNAi agent described herein, R of Formula I is a compound comprising one or more oligonucleotides of an RNAi agent described herein. A linker, for example as further described herein, may be used to link Formula I to the one or oligonucleotides described herein. In a suitable further embodiment, the delivery moiety comprising Formula I delivers the one or more RNAi agents to liver tissue, by binding to the extracellular receptor ASPGR and permitting entry of the RNAi agents into the cells that comprise the liver tissue. The delivery moiety comprising Formula I can be used to deliver RNAi agents for diagnostic or therapeutic purposes.

[1088] In one embodiment is a compound comprising Formula I, wherein R is an oligonucleotide (e.g., an oligonucleotide comprising a sense strand and an antisense strand)linked to the remainder of Formula I either directly or through a linker, for decreasing expression of a target transcript. In a further embodiment the compound comprising Formula I, wherein R is an oligonucleotide (e.g., an oligonucleotide comprising a sense strand and an antisense strand) linked to the remainder of Formula I either directly or through a linker, for decreasing expression of a target transcript which further decreases protein expression.

[1089] In some embodiments R is conjugated to Formula I via a linker. Suitable linkers are known in the art, examples of which are described herein. In one embodiment, the linker comprises an alkyl chain, suitably C1-10. In a further embodiment, the linker is shown below as Linker 1, Formula II. In another embodiment the linker comprises a piperidine. In a further suitable embodiment, the linker is shown below as Linker 2, Formula III. In some embodiments, R is conjugated to Formula I via Formula III (also referred to herein as “Formula IV”).

### D. Linking Groups

[1090] In some embodiments, the RNAi agent as provided herein is conjugated to a linking group. Examples of linking groups are provided in Table 4. The linking group can be covalently linked to the 3′ and/or 5′ end of either the sense strand and/or the antisense strand. Exemplary linking groups are disclosed in U.S. Pat. No. 9,771,591, which is incorporated herein in its entirety.

[1091] In some embodiments, a linking group is conjugated to the RNAi agent. The linking group facilitates covalent linkage of the agent to a targeting group or delivery polymer or delivery vehicle. The linking group can be linked to the 3′ or the 5′ end of the RNAi agent sense strand or antisense strand. In some embodiments, the linking group is linked to the RNAi agent sense strand. In some embodiments, the linking group is conjugated to the 5′ or 3′ end of an RNAi agent sense strand. In some embodiments, a linking group is conjugated to the 5′ end of an RNAi agent sense strand. Examples of linking groups, include, but are not limited to: reactive groups such a primary amines and alkynes, alkyl groups, abasic nucleosides, ribitol (abasic ribose), and/or PEG groups.

[1092] A linker or linking group is a connection between two atoms that links one chemical group (such as an RNAi agent) or segment of interest to another chemical group (such as a targeting group or delivery polymer) or segment of interest via one or more covalent bonds. A labile linkage contains a labile bond. A linkage may optionally include a spacer that increases the distance between the two joined atoms. A spacer may further add flexibility and/or length to the linkage. Spacers may include, but are not be limited to, alkyl groups, alkenyl groups, alkynyl groups, aryl groups, aralkyl groups, aralkenyl groups, and aralkynyl groups; each of which can contain one or more heteroatoms, heterocycles, amino acids, nucleotides, and saccharides. Spacer groups are well known in the art and the preceding list is not meant to limit the scope of the description.

[1093] In some embodiments, the linker comprises a direct bond or an atom such as oxygen or sulfur, a unit such as NR8, C(O), C(O)NH, SO, SO₂, SO₂NH or a chain of atoms, such as, but not limited to, substituted or unsubstituted alkyl, substituted or unsubstituted alkenyl, substituted or unsubstituted alkynyl, arylalkyl, arylalkenyl, arylalkynyl, heteroarylalkyl, heteroarylalkenyl, heteroarylalkynyl, heterocyclylalkyl, heterocyclylalkenyl, heterocyclylalkynyl, aryl, heteroaryl, heterocyclyl, cycloalkyl, cycloalkenyl, alkylarylalkyl, alkylarylalkenyl, alkylarylalkynyl, alkenylarylalkyl, alkenylarylalkenyl, alkenylarylalkynyl, alkynylarylalkyl, alkynylarylalkenyl, alkynylarylalkynyl, alkylheteroarylalkyl, alkylheteroarylalkenyl, alkylheteroarylalkynyl, alkenylheteroarylalkyl, alkenylheteroarylalkenyl, alkenylheteroarylalkynyl, alkynylheteroarylalkyl, alkynylheteroarylalkenyl, alkynylheteroarylalkynyl, alkylheterocyclylalkyl, alkylheterocyclylalkenyl, alkylhererocyclylalkynyl, alkenylheterocyclylalkyl, alkenylheterocyclylalkenyl, alkenylheterocyclylalkynyl, alkynylheterocyclylalkyl, alkynylheterocyclylalkenyl, alkynylheterocyclylalkynyl, alkylaryl, alkenylaryl, alkynylaryl, alkylheteroaryl, alkenylheteroaryl, alkynylhereroaryl, which one or more methylenes can be interrupted or terminated by O, S, S(O), SO₂, N(R8), C(O), substituted or unsubstituted aryl, substituted or unsubstituted heteroaryl, substituted or unsubstituted heterocyclic; where R8 is hydrogen, acyl, aliphatic or substituted aliphatic. In one embodiment, the linker is between about 1-24 atoms, 2-24, 3-24, 4-24, 5-24, 6-24, 6-18, 7-18, 8-18 atoms, 7-17, 8-17, 6-16, 7-17, or 8-16 atoms.

[1094] In some embodiments, the linker is a cleavable linker (also referred to herein as a “cleavable linking group” that is sufficiently stable outside the cell, but which upon entry into a target cell is cleaved to release the two parts the linker is holding together. In some embodiments, the cleavable linker is cleaved at least about 10 times, 20, times, 30 times, 40 times, 50 times, 60 times, 70 times, 80 times, 90 times or more, or at least about 100 times faster in a target cell or under a first reference condition (which can, e.g., be selected to mimic or represent intracellular conditions) than in the blood of a subject, or under a second reference condition (which can, e.g., be selected to mimic or represent conditions found in the blood or serum).

[1095] Cleavable linking groups are susceptible to cleavage agents, e.g., pH, redox potential or the presence of degradative molecules. Generally, cleavage agents are more prevalent or found at higher levels or activities inside cells than in serum or blood. Examples of such degradative agents include: redox agents which are selected for particular substrates or which have no substrate specificity, including, e.g., oxidative or reductive enzymes or reductive agents such as mercaptans, present in cells, that can degrade a redox cleavable linking group by reduction; esterases; endosomes or agents that can create an acidic environment, e.g., those that result in a pH of five or lower; enzymes that can hydrolyze or degrade an acid cleavable linking group by acting as a general acid, peptidases (which can be substrate specific), and phosphatases.

[1096] A cleavable linkage group, such as a disulfide bond can be susceptible to pH. The pH of human serum is 7.4, while the average intracellular pH is slightly lower, ranging from about 7.1-7.3. Endosomes have a more acidic pH, in the range of 5.5-6.0, and lysosomes have an even more acidic pH at around 5.0. Some linkers will have a cleavable linking group that is cleaved at a preferred pH, thereby releasing a cationic lipid from the ligand inside the cell, or into the desired compartment of the cell.

[1097] A linker can include a cleavable linking group that is cleavable by a particular enzyme. The type of cleavable linking group incorporated into a linker can depend on the cell to be targeted. For example, a liver-targeting ligand can be linked to a cationic lipid through a linker that includes an ester group. Liver cells are rich in esterases, and therefore the linker will be cleaved more efficiently in liver cells than in cell types that are not esterase-rich. Other cell-types rich in esterases include cells of the lung, renal cortex, and testis.

[1098] Linkers that contain peptide bonds can be used when targeting cell types rich in peptidases, such as liver cells and synoviocytes.

[1099] In some embodiments, a cleavable linking group is a redox cleavable linking group that is cleaved upon reduction or oxidation. A n example of reductively cleavable linking group is a disulphide linking group (—S—S—). To determine if a candidate cleavable linking group is a suitable “reductively cleavable linking group,” or for example is suitable for use with a particular iRNA moiety and particular targeting agent one can look to methods described herein. For example, a candidate can be evaluated by incubation with dithiothreitol (DTT), or other reducing agent using reagents know in the art, which mimic the rate of cleavage which would be observed in a cell, e.g., a target cell. The candidates can also be evaluated under conditions which are selected to mimic blood or serum conditions. In one, candidate compounds are cleaved by at most about 10% in the blood. In other embodiments, useful candidate compounds are degraded at least about 2, 4, 10, 20, 30, 40, 50, 60, 70, 80, 90, or about 100 times faster in the cell (or under in vitro conditions selected to mimic intracellular conditions) as compared to blood (or under in vitro conditions selected to mimic extracellular conditions). The rate of cleavage of candidate compounds can be determined using standard enzyme kinetics assays under conditions chosen to mimic intracellular media and compared to conditions chosen to mimic extracellular media.

[1100] In some embodiments, a cleavable linker comprises a phosphate-based cleavable linking group. A phosphate-based cleavable linking group is cleaved by agents that degrade or hydrolyze the phosphate group. A n example of an agent that cleaves phosphate groups in cells are enzymes such as phosphatases in cells. Examples of phosphate-based linking groups are —O—P(O)(ORk)-O—, —O—P(S)(ORk)-O—, —O—P(S)(SRk)-O—, —S—P(O)(ORk)-O—, —O—P(O)(ORk)-S—, —S—P(O)(ORk)-S—, —O—P(S)(ORk)-S—, —S—P(S)(ORk)-O—, —O—P(O)(Rk)-O—, —O—P(S)(Rk)-O—, —S—P(O)(Rk)-O—, —S—P(S)(Rk)-O—, —S—P(O)(Rk)-S—, —O—P(S)(Rk)-S—. Preferred embodiments are —O—P(O)(OH)+O—, —O—P(S)(OH)+O—, —O—P(S)(SH)—O—, —S—P(O)(OH)—O—, —O—P(O)(OH)—S—, —S—P(O)(OH)—S—, —O—P(S)(OH)—S—, —S—P(S)(OH)—O—, —O—P(O)(H)—O—, —O—P(S)(H)—O—, —S—P(O)(H)—O—, —S—P(S)(H)—O—, —S—P(O)(H)—S—, —O—P(S)(H)—S—. A preferred embodiment is —O—P(O)(OH)—O—. These candidates can be evaluated using methods analogous to those described above.

[1101] In some embodiments, a cleavable linker comprises an acid cleavable linking group. An acid cleavable linking group is a linking group that is cleaved under acidic conditions. In preferred embodiments acid cleavable linking groups are cleaved in an acidic environment with a pH of about 6.5 or lower (e.g., about 6.0, 5.75, 5.5, 5.25, 5.0, or lower), or by agents such as enzymes that can act as a general acid. In a cell, specific low pH organelles, such as endosomes and lysosomes can provide a cleaving environment for acid cleavable linking groups. Examples of acid cleavable linking groups include but are not limited to hydrazones, esters, and esters of amino acids. Acid cleavable groups can have the general formula—C═NN—, C(O)O, or —OC(O). A preferred embodiment is when the carbon attached to the oxygen of the ester (the alkoxy group) is an aryl group, substituted alkyl group, or tertiary alkyl group such as dimethyl pentyl or t-butyl. These candidates can be evaluated using methods analogous to those described above.

[1102] In some embodiments, a cleavable linker comprises an ester-based cleavable linking group. A n ester-based cleavable linking group is cleaved by enzymes such as esterases and amidases in cells. Examples of ester-based cleavable linking groups include but are not limited to esters of alkylene, alkenylene and alkynylene groups. Ester cleavable linking groups have the general formula —C(O)O—, or —OC(O)—. These candidates can be evaluated using methods analogous to those described above.

[1103] In some embodiments, a cleavable linker comprises a peptide-based cleavable linking group. A peptide-based cleavable linking group is cleaved by enzymes such as peptidases and proteases in cells. Peptide-based cleavable linking groups are peptide bonds formed between amino acids to yield oligopeptides (e.g., dipeptides, tripeptides etc.) and polypeptides. Peptide-based cleavable groups do not include the amide group (—C(O)NH—). The amide group can be formed between any alkylene, alkenylene or alkynelene. A peptide bond is a special type of amide bond formed between amino acids to yield peptides and proteins. The peptide based cleavage group is generally limited to the peptide bond (i.e., the amide bond) formed between amino acids yielding peptides and proteins and does not include the entire amide functional group. Peptide-based cleavable linking groups have the general formula—NHCHRAC(O)NHCHRBC(O)—, where RA and RB are the R groups of the two adjacent amino acids. These candidates can be evaluated using methods analogous to those described above.

[1104] In some embodiments, the RNAi agent nucleotide sequences comprises a 3′ or 5′ targeting ligand and/or linking group. In some embodiments, the RNAi agent nucleotide sequence does not comprise a 3′ or 5′ targeting ligand and/or linking group. In some embodiments, the targeting ligand or linking group may be attached to the 3′ or 5′ terminus of either the sense strand or the antisense strand of the RNAi agent duplex.

[1105] In an exemplary embodiment, the linker is shown below as Linker 1, Formula II. In another embodiment the linker comprises a piperidine. In a further suitable embodiment, the linker is shown below as Linker 2, Formula III.

[chemical structure]

[1106] In an embodiment Linker 1 (Formula II), connection point A, or Linker 2 (Formula III), connection point C, is conjugated to Formula I. In an embodiment Linker 1, connection point A, is conjugated to Formula I and connection point B is conjugated to R (e.g., an oligonucleotide). In an embodiment Linker 2, connection point C, is conjugated to Formula I and connection point D is conjugated to R (e.g., an oligonucleotide). In an embodiment Linker 1, connection point A, is conjugated to Formula I and connection point B is conjugated to a phosphate group which is conjugated to R. In an embodiment Linker 2, connection point C, is conjugated to Formula I and connection point D is conjugated to a phosphate group which is conjugated to R. One of skill in the art will recognize that the linker may be on the 5′ or 3′ end of an oligonucleotide, or attached to one of the internal nucleotide or nucleoside bases.

[1107] One of skill in the art will also recognize that the linker maybe linked or conjugated to the 5′ or 3′ end of an oligonucleotide. One of skill in the art will also recognize that placement of a delivery moiety, such as the delivery moieties comprising Formula I, whether via a linker or not, on the 5′ end an oligonucleotide may need to overcome potential inefficient loading of Ago2 loading, or other hindrance of the RISC complex activity. For example, for a delivery moiety comprising Formula I linked or directly conjugated to an siRNA comprising a sense and an antisense strand, placement of the delivery moiety at the 5′ end of the antisense strand may create difficulties for Ago2 loading and prevent efficient knockdown. In a suitable embodiment, the one or more oligonucleotides comprise an siRNA comprising a sense and an antisense strand, and the delivery moiety comprising Formula I is present on the 3′ end of the sense strand. In a further embodiment, the delivery moiety comprising Formula I is conjugated to the 3′ end of the sense strand via a linker. In yet a further embodiment the linker comprises a ring structure, suitably a piperidine ring. In yet a further embodiment, the linker comprises Linker 2.

[1108] Additional examples of targeting ligands, linking groups, and combinations thereof are provided in Table 4. In some embodiments, the targeting ligand and linking group combination comprises Formula IV. In some embodiments, the targeting ligand and linking group combination comprises Formula V. In some embodiments, the targeting ligand and linking group combination comprises Formula VI.

[1109] Table 4. Structures representing various modified nucleotides, targeting groups, linking groups, and combinations of targeting groups and linking groups.

TABLE 4
Structures representing various modified nucleotides, targeting groups, linking
groups, and combinations of targeting groups and linking groups.

[chemical structure]

[chemical structure]

[chemical structure]

[chemical structure]

[chemical structure]

[chemical structure]

When positioned internally on oligonucleotide:

[chemical structure]

When positioned internally on oligonucleotide:

[chemical structure]

When positioned at the 3′ terminal end of oligonucleotide:

[chemical structure]

[chemical structure]

[chemical structure]

[chemical structure]

[chemical structure]

[chemical structure]

[chemical structure]

[chemical structure]

[chemical structure]

[chemical structure]

[chemical structure]

[chemical structure]

[chemical structure]

[chemical structure]

[chemical structure]

[chemical structure]

[chemical structure]

[chemical structure]

[chemical structure]

[chemical structure]

[chemical structure]

[chemical structure]

[chemical structure]

[chemical structure]

[chemical structure]

[chemical structure]

[chemical structure]

[chemical structure]

[chemical structure]

[chemical structure]

[chemical structure]

[chemical structure]

[chemical structure]

[chemical structure]

[chemical structure]

[chemical structure]

[chemical structure]

[chemical structure]

[chemical structure]

[chemical structure]

where R is an oligonucleotide conjugated to Formula I via
Formula III
Formula IV

[chemical structure]

[chemical structure]

[chemical structure]

[1110] Formula V′ is a precursor of the Formula V as it may exist before it is conjugated to the RNAi agent. In some implementations of making a GalNAc-RNAi conjugate, Formula V′ is bound, e.g., to a support at the squiggle sign. Then the 3′ phosphate of a nucleotide is reacted with the methoxy off the pyrrolidine ring, and then additional nucleotides are added, growing a strand 3′→5′. Finally the GalNAc-RNAi conjugate is hydrolyzed at the site of the squiggle sign of Formula V′, cleaving it off the support, resulting a GalNAc-RNAi conjugate that includes the GalNAc of Formula V.

[1111] In some embodiments, the modified sense strand of the RNAi agent is conjugated to the targeting ligand and linking group of Formula IV.

[1112] In some embodiments, the RNAi agent has a modified sense strand of SEQ ID NO: 385 conjugated to Formula IV at the 3′ end. In some embodiments, the RNAi agent has a modified antisense strand of SEQ ID NO: 193. In some embodiments, the RNAi agent has a modified sense strand of SEQ ID NO: 385 conjugated to Formula IV at the 3′ end and a modified antisense strand of SEQ ID NO: 193.

[1113] In some embodiments, the RNAi agent has a modified sense strand of SEQ ID NO: 386 conjugated to Formula IV at the 3′ end. In some embodiments, the RNAi agent has a modified antisense strand of SEQ ID NO: 194. In some embodiments, the RNAi agent has a modified sense strand of SEQ ID NO: 386 conjugated to Formula IV at the 3′ end and a modified antisense strand of SEQ ID NO: 194.

[1114] In some embodiments, the RNAi agent has a modified sense strand of SEQ ID NO: 387 conjugated to Formula IV at the 3′ end. In some embodiments, the RNAi agent has a modified antisense strand of SEQ ID NO: 195. In some embodiments, the RNAi agent has a modified sense strand of SEQ ID NO: 387 conjugated to Formula IV at the 3′ end and a modified antisense strand of SEQ ID NO: 195.

[1115] In some embodiments, the RNAi agent has a modified sense strand of SEQ ID NO: 388 conjugated to Formula IV at the 3′ end. In some embodiments, the RNAi agent has a modified antisense strand of SEQ ID NO: 196. In some embodiments, the RNAi agent has a modified sense strand of SEQ ID NO: 388 conjugated to Formula IV at the 3′ end and a modified antisense strand of SEQ ID NO: 196.

[1116] In some embodiments, the RNAi agent has a modified sense strand of SEQ ID NO: 389 conjugated to Formula IV at the 3′ end. In some embodiments, the RNAi agent has a modified antisense strand of SEQ ID NO: 197. In some embodiments, the RNAi agent has a modified sense strand of SEQ ID NO: 389 conjugated to Formula IV at the 3′ end and a modified antisense strand of SEQ ID NO: 197.

[1117] In some embodiments, the RNAi agent has a modified sense strand of SEQ ID NO: 390 conjugated to Formula IV at the 3′ end. In some embodiments, the RNAi agent has a modified antisense strand of SEQ ID NO: 198. In some embodiments, the RNAi agent has a modified sense strand of SEQ ID NO: 390 conjugated to Formula IV at the 3′ end and a modified antisense strand of SEQ ID NO: 198.

[1118] In some embodiments, the RNAi agent has a modified sense strand of SEQ ID NO: 391 conjugated to Formula IV at the 3′ end. In some embodiments, the RNAi agent has a modified antisense strand of SEQ ID NO: 199. In some embodiments, the RNAi agent has a modified sense strand of SEQ ID NO: 391 conjugated to Formula IV at the 3′ end and a modified antisense strand of SEQ ID NO: 199.

[1119] In some embodiments, the RNAi agent has a modified sense strand of SEQ ID NO: 392 conjugated to Formula IV at the 3′ end. In some embodiments, the RNAi agent has a modified antisense strand of SEQ ID NO: 200. In some embodiments, the RNAi agent has a modified sense strand of SEQ ID NO: 392 conjugated to Formula IV at the 3′ end and a modified antisense strand of SEQ ID NO: 200.

[1120] In some embodiments, the RNAi agent has a modified sense strand of SEQ ID NO: 393 conjugated to Formula IV at the 3′ end. In some embodiments, the RNAi agent has a modified antisense strand of SEQ ID NO: 201. In some embodiments, the RNAi agent has a modified sense strand of SEQ ID NO: 393 conjugated to Formula IV at the 3′ end and a modified antisense strand of SEQ ID NO: 201.

[1121] In some embodiments, the RNAi agent has a modified sense strand of SEQ ID NO: 394 conjugated to Formula IV at the 3′ end. In some embodiments, the RNAi agent has a modified antisense strand of SEQ ID NO: 202. In some embodiments, the RNAi agent has a modified sense strand of SEQ ID NO: 394 conjugated to Formula IV at the 3′ end and a modified antisense strand of SEQ ID NO: 202.

[1122] In some embodiments, the RNAi agent has a modified sense strand of SEQ ID NO: 395 conjugated to Formula IV at the 3′ end. In some embodiments, the RNAi agent has a modified antisense strand of SEQ ID NO: 203. In some embodiments, the RNAi agent has a modified sense strand of SEQ ID NO: 395 conjugated to Formula IV at the 3′ end and a modified antisense strand of SEQ ID NO: 203.

[1123] In some embodiments, the RNAi agent has a modified sense strand of SEQ ID NO: 396 conjugated to Formula IV at the 3′ end. In some embodiments, the RNAi agent has a modified antisense strand of SEQ ID NO: 204. In some embodiments, the RNAi agent has a modified sense strand of SEQ ID NO: 306 conjugated to Formula IV at the 3′ end and a modified antisense strand of SEQ ID NO: 204.

[1124] In some embodiments, the RNAi agent has a modified sense strand of SEQ ID NO: 397 conjugated to Formula IV at the 3′ end. In some embodiments, the RNAi agent has a modified antisense strand of SEQ ID NO: 205. In some embodiments, the RNAi agent has a modified sense strand of SEQ ID NO: 397 conjugated to Formula IV at the 3′ end and a modified antisense strand of SEQ ID NO: 205.

[1125] In some embodiments, the RNAi agent has a modified sense strand of SEQ ID NO: 398 conjugated to Formula IV at the 3′ end. In some embodiments, the RNAi agent has a modified antisense strand of SEQ ID NO: 206. In some embodiments, the RNAi agent has a modified sense strand of SEQ ID NO: 398 conjugated to Formula IV at the 3′ end and a modified antisense strand of SEQ ID NO: 206.

[1126] In some embodiments, the RNAi agent has a modified sense strand of SEQ ID NO: 399 conjugated to Formula IV at the 3′ end. In some embodiments, the RNAi agent has a modified antisense strand of SEQ ID NO: 207. In some embodiments, the RNAi agent has a modified sense strand of SEQ ID NO: 399 conjugated to Formula IV at the 3′ end and a modified antisense strand of SEQ ID NO: 207.

[1127] In some embodiments, the RNAi agent has a modified sense strand of SEQ ID NO: 400 conjugated to Formula IV at the 3′ end. In some embodiments, the RNAi agent has a modified antisense strand of SEQ ID NO: 208. In some embodiments, the RNAi agent has a modified sense strand of SEQ ID NO: 400 conjugated to Formula IV at the 3′ end and a modified antisense strand of SEQ ID NO: 208.

[1128] In some embodiments, the RNAi agent has a modified sense strand of SEQ ID NO: 401 conjugated to Formula IV at the 3′ end. In some embodiments, the RNAi agent has a modified antisense strand of SEQ ID NO: 209. In some embodiments, the RNAi agent has a modified sense strand of SEQ ID NO: 401 conjugated to Formula IV at the 3′ end and a modified antisense strand of SEQ ID NO: 209.

[1129] In some embodiments, the RNAi agent has a modified sense strand of SEQ ID NO: 402 conjugated to Formula IV at the 3′ end. In some embodiments, the RNAi agent has a modified antisense strand of SEQ ID NO: 210. In some embodiments, the RNAi agent has a modified sense strand of SEQ ID NO: 402 conjugated to Formula IV at the 3′ end and a modified antisense strand of SEQ ID NO: 210.

[1130] In some embodiments, the RNAi agent has a modified sense strand of SEQ ID NO: 403 conjugated to Formula IV at the 3′ end. In some embodiments, the RNAi agent has a modified antisense strand of SEQ ID NO: 211. In some embodiments, the RNAi agent has a modified sense strand of SEQ ID NO: 403 conjugated to Formula IV at the 3′ end and a modified antisense strand of SEQ ID NO: 211.

[1131] In some embodiments, the RNAi agent has a modified sense strand of SEQ ID NO: 404 conjugated to Formula IV at the 3′ end. In some embodiments, the RNAi agent has a modified antisense strand of SEQ ID NO: 212. In some embodiments, the RNAi agent has a modified sense strand of SEQ ID NO: 404 conjugated to Formula IV at the 3′ end and a modified antisense strand of SEQ ID NO: 212.

[1132] In some embodiments, the RNAi agent has a modified sense strand of SEQ ID NO: 405 conjugated to Formula IV at the 3′ end. In some embodiments, the RNAi agent has a modified antisense strand of SEQ ID NO: 213. In some embodiments, the RNAi agent has a modified sense strand of SEQ ID NO: 405 conjugated to Formula IV at the 3′ end and a modified antisense strand of SEQ ID NO: 213.

[1133] In some embodiments, the RNAi agent has a modified sense strand of SEQ ID NO: 406 conjugated to Formula IV at the 3′ end. In some embodiments, the RNAi agent has a modified antisense strand of SEQ ID NO: 214. In some embodiments, the RNAi agent has a modified sense strand of SEQ ID NO: 406 conjugated to Formula IV at the 3′ end and a modified antisense strand of SEQ ID NO: 214.

[1134] In some embodiments, the RNAi agent has a modified sense strand of SEQ ID NO: 407 conjugated to Formula IV at the 3′ end. In some embodiments, the RNAi agent has a modified antisense strand of SEQ ID NO: 215. In some embodiments, the RNAi agent has a modified sense strand of SEQ ID NO: 407 conjugated to Formula IV at the 3′ end and a modified antisense strand of SEQ ID NO: 215.

[1135] In some embodiments, the RNAi agent has a modified sense strand of SEQ ID NO: 408 conjugated to Formula IV at the 3′ end. In some embodiments, the RNAi agent has a modified antisense strand of SEQ ID NO: 216. In some embodiments, the RNAi agent has a modified sense strand of SEQ ID NO: 408 conjugated to Formula IV at the 3′ end and a modified antisense strand of SEQ ID NO: 216.

[1136] In some embodiments, the RNAi agent has a modified sense strand of SEQ ID NO: 409 conjugated to Formula IV at the 3′ end. In some embodiments, the RNAi agent has a modified antisense strand of SEQ ID NO: 217. In some embodiments, the RNAi agent has a modified sense strand of SEQ ID NO: 409 conjugated to Formula IV at the 3′ end and a modified antisense strand of SEQ ID NO: 217.

[1137] In some embodiments, the RNAi agent has a modified sense strand of SEQ ID NO: 410 conjugated to Formula IV at the 3′ end. In some embodiments, the RNAi agent has a modified antisense strand of SEQ ID NO: 218. In some embodiments, the RNAi agent has a modified sense strand of SEQ ID NO: 410 conjugated to Formula IV at the 3′ end and a modified antisense strand of SEQ ID NO: 218.

[1138] In some embodiments, the RNAi agent has a modified sense strand of SEQ ID NO: 411 conjugated to Formula IV at the 3′ end. In some embodiments, the RNAi agent has a modified antisense strand of SEQ ID NO: 219. In some embodiments, the RNAi agent has a modified sense strand of SEQ ID NO: 411 conjugated to Formula IV at the 3′ end and a modified antisense strand of SEQ ID NO: 219.

[1139] In some embodiments, the RNAi agent has a modified sense strand of SEQ ID NO: 412 conjugated to Formula IV at the 3′ end. In some embodiments, the RNAi agent has a modified antisense strand of SEQ ID NO: 220. In some embodiments, the RNAi agent has a modified sense strand of SEQ ID NO: 412 conjugated to Formula IV at the 3′ end and a modified antisense strand of SEQ ID NO: 220.

[1140] In some embodiments, the RNAi agent has a modified sense strand of SEQ ID NO: 413 conjugated to Formula IV at the 3′ end. In some embodiments, the RNAi agent has a modified antisense strand of SEQ ID NO: 221. In some embodiments, the RNAi agent has a modified sense strand of SEQ ID NO: 413 conjugated to Formula IV at the 3′ end and a modified antisense strand of SEQ ID NO: 221.

[1141] In some embodiments, the RNAi agent has a modified sense strand of SEQ ID NO: 414 conjugated to Formula IV at the 3′ end. In some embodiments, the RNAi agent has a modified antisense strand of SEQ ID NO: 222. In some embodiments, the RNAi agent has a modified sense strand of SEQ ID NO: 414 conjugated to Formula IV at the 3′ end and a modified antisense strand of SEQ ID NO: 222.

[1142] In some embodiments, the RNAi agent has a modified sense strand of SEQ ID NO: 415 conjugated to Formula IV at the 3′ end. In some embodiments, the RNAi agent has a modified antisense strand of SEQ ID NO: 223. In some embodiments, the RNAi agent has a modified sense strand of SEQ ID NO: 415 conjugated to Formula IV at the 3′ end and a modified antisense strand of SEQ ID NO: 223.

[1143] In some embodiments, the RNAi agent has a modified sense strand of SEQ ID NO: 416 conjugated to Formula IV at the 3′ end. In some embodiments, the RNAi agent has a modified antisense strand of SEQ ID NO: 224. In some embodiments, the RNAi agent has a modified sense strand of SEQ ID NO: 416 conjugated to Formula IV at the 3′ end and a modified antisense strand of SEQ ID NO: 224.

[1144] In some embodiments, the RNAi agent has a modified sense strand of SEQ ID NO: 417 conjugated to Formula IV at the 3′ end. In some embodiments, the RNAi agent has a modified antisense strand of SEQ ID NO: 225. In some embodiments, the RNAi agent has a modified sense strand of SEQ ID NO: 417 conjugated to Formula IV at the 3′ end and a modified antisense strand of SEQ ID NO: 225.

[1145] In some embodiments, the RNAi agent has a modified sense strand of SEQ ID NO: 418 conjugated to Formula IV at the 3′ end. In some embodiments, the RNAi agent has a modified antisense strand of SEQ ID NO: 226. In some embodiments, the RNAi agent has a modified sense strand of SEQ ID NO: 418 conjugated to Formula IV at the 3′ end and a modified antisense strand of SEQ ID NO: 226.

[1146] In some embodiments, the RNAi agent has a modified sense strand of SEQ ID NO: 419 conjugated to Formula IV at the 3′ end. In some embodiments, the RNAi agent has a modified antisense strand of SEQ ID NO: 227. In some embodiments, the RNAi agent has a modified sense strand of SEQ ID NO: 419 conjugated to Formula IV at the 3′ end and a modified antisense strand of SEQ ID NO: 227.

[1147] In some embodiments, the RNAi agent has a modified sense strand of SEQ ID NO: 420 conjugated to Formula IV at the 3′ end. In some embodiments, the RNAi agent has a modified antisense strand of SEQ ID NO: 228. In some embodiments, the RNAi agent has a modified sense strand of SEQ ID NO: 420 conjugated to Formula IV at the 3′ end and a modified antisense strand of SEQ ID NO: 228.

[1148] In some embodiments, the RNAi agent has a modified sense strand of SEQ ID NO: 421 conjugated to Formula IV at the 3′ end. In some embodiments, the RNAi agent has a modified antisense strand of SEQ ID NO: 229. In some embodiments, the RNAi agent has a modified sense strand of SEQ ID NO: 421 conjugated to Formula IV at the 3′ end and a modified antisense strand of SEQ ID NO: 229.

[1149] In some embodiments, the RNAi agent has a modified sense strand of SEQ ID NO: 422 conjugated to Formula IV at the 3′ end. In some embodiments, the RNAi agent has a modified antisense strand of SEQ ID NO: 230. In some embodiments, the RNAi agent has a modified sense strand of SEQ ID NO: 422 conjugated to Formula IV at the 3′ end and a modified antisense strand of SEQ ID NO: 230.

[1150] In some embodiments, the RNAi agent has a modified sense strand of SEQ ID NO: 423 conjugated to Formula IV at the 3′ end. In some embodiments, the RNAi agent has a modified antisense strand of SEQ ID NO: 231. In some embodiments, the RNAi agent has a modified sense strand of SEQ ID NO: 423 conjugated to Formula IV at the 3′ end and a modified antisense strand of SEQ ID NO: 231.

[1151] In some embodiments, the RNAi agent has a modified sense strand of SEQ ID NO: 424 conjugated to Formula IV at the 3′ end. In some embodiments, the RNAi agent has a modified antisense strand of SEQ ID NO: 232. In some embodiments, the RNAi agent has a modified sense strand of SEQ ID NO: 424 conjugated to Formula IV at the 3′ end and a modified antisense strand of SEQ ID NO: 232.

[1152] In some embodiments, the RNAi agent has a modified sense strand of SEQ ID NO: 425 conjugated to Formula IV at the 3′ end. In some embodiments, the RNAi agent has a modified antisense strand of SEQ ID NO: 233. In some embodiments, the RNAi agent has a modified sense strand of SEQ ID NO: 425 conjugated to Formula IV at the 3′ end and a modified antisense strand of SEQ ID NO: 233.

[1153] In some embodiments, the RNAi agent has a modified sense strand of SEQ ID NO: 426 conjugated to Formula IV at the 3′ end. In some embodiments, the RNAi agent has a modified antisense strand of SEQ ID NO: 234. In some embodiments, the RNAi agent has a modified sense strand of SEQ ID NO: 426 conjugated to Formula IV at the 3′ end and a modified antisense strand of SEQ ID NO: 234.

[1154] In some embodiments, the RNAi agent has a modified sense strand of SEQ ID NO: 427 conjugated to Formula IV at the 3′ end. In some embodiments, the RNAi agent has a modified antisense strand of SEQ ID NO: 235. In some embodiments, the RNAi agent has a modified sense strand of SEQ ID NO: 427 conjugated to Formula IV at the 3′ end and a modified antisense strand of SEQ ID NO: 235.

[1155] In some embodiments, the RNAi agent has a modified sense strand of SEQ ID NO: 428 conjugated to Formula IV at the 3′ end. In some embodiments, the RNAi agent has a modified antisense strand of SEQ ID NO: 236. In some embodiments, the RNAi agent has a modified sense strand of SEQ ID NO: 428 conjugated to Formula IV at the 3′ end and a modified antisense strand of SEQ ID NO: 236.

[1156] In some embodiments, the RNAi agent has a modified sense strand of SEQ ID NO: 429 conjugated to Formula IV at the 3′ end. In some embodiments, the RNAi agent has a modified antisense strand of SEQ ID NO: 237. In some embodiments, the RNAi agent has a modified sense strand of SEQ ID NO: 429 conjugated to Formula IV at the 3′ end and a modified antisense strand of SEQ ID NO: 237.

[1157] In some embodiments, the RNAi agent has a modified sense strand of SEQ ID NO: 430 conjugated to Formula IV at the 3′ end. In some embodiments, the RNAi agent has a modified antisense strand of SEQ ID NO: 238. In some embodiments, the RNAi agent has a modified sense strand of SEQ ID NO: 430 conjugated to Formula IV at the 3′ end and a modified antisense strand of SEQ ID NO: 238.

[1158] In some embodiments, the RNAi agent has a modified sense strand of SEQ ID NO: 431 conjugated to Formula IV at the 3′ end. In some embodiments, the RNAi agent has a modified antisense strand of SEQ ID NO: 239. In some embodiments, the RNAi agent has a modified sense strand of SEQ ID NO: 431 conjugated to Formula IV at the 3′ end and a modified antisense strand of SEQ ID NO: 239.

[1159] In some embodiments, the RNAi agent has a modified sense strand of SEQ ID NO: 432 conjugated to Formula IV at the 3′ end. In some embodiments, the RNAi agent has a modified antisense strand of SEQ ID NO: 240. In some embodiments, the RNAi agent has a modified sense strand of SEQ ID NO: 432 conjugated to Formula IV at the 3′ end and a modified antisense strand of SEQ ID NO: 240.

[1160] In some embodiments, the RNAi agent has a modified sense strand of SEQ ID NO: 433 conjugated to Formula IV at the 3′ end. In some embodiments, the RNAi agent has a modified antisense strand of SEQ ID NO: 241. In some embodiments, the RNAi agent has a modified sense strand of SEQ ID NO: 433 conjugated to Formula IV at the 3′ end and a modified antisense strand of SEQ ID NO: 241.

[1161] In some embodiments, the RNAi agent has a modified sense strand of SEQ ID NO: 434 conjugated to Formula IV at the 3′ end. In some embodiments, the RNAi agent has a modified antisense strand of SEQ ID NO: 242. In some embodiments, the RNAi agent has a modified sense strand of SEQ ID NO: 434 conjugated to Formula IV at the 3′ end and a modified antisense strand of SEQ ID NO: 242.

[1162] In some embodiments, the RNAi agent has a modified sense strand of SEQ ID NO: 435 conjugated to Formula IV at the 3′ end. In some embodiments, the RNAi agent has a modified antisense strand of SEQ ID NO: 243. In some embodiments, the RNAi agent has a modified sense strand of SEQ ID NO: 435 conjugated to Formula IV at the 3′ end and a modified antisense strand of SEQ ID NO: 243.

[1163] In some embodiments, the RNAi agent has a modified sense strand of SEQ ID NO: 436 conjugated to Formula IV at the 3′ end. In some embodiments, the RNAi agent has a modified antisense strand of SEQ ID NO: 244. In some embodiments, the RNAi agent has a modified sense strand of SEQ ID NO: 436 conjugated to Formula IV at the 3′ end and a modified antisense strand of SEQ ID NO: 244.

[1164] In some embodiments, the RNAi agent has a modified sense strand of SEQ ID NO: 437 conjugated to Formula IV at the 3′ end. In some embodiments, the RNAi agent has a modified antisense strand of SEQ ID NO: 245. In some embodiments, the RNAi agent has a modified sense strand of SEQ ID NO: 437 conjugated to Formula IV at the 3′ end and a modified antisense strand of SEQ ID NO: 245.

[1165] In some embodiments, the RNAi agent has a modified sense strand of SEQ ID NO: 438 conjugated to Formula IV at the 3′ end. In some embodiments, the RNAi agent has a modified antisense strand of SEQ ID NO: 246. In some embodiments, the RNAi agent has a modified sense strand of SEQ ID NO: 438 conjugated to Formula IV at the 3′ end and a modified antisense strand of SEQ ID NO: 246.

[1166] In some embodiments, the RNAi agent has a modified sense strand of SEQ ID NO: 439 conjugated to Formula IV at the 3′ end. In some embodiments, the RNAi agent has a modified antisense strand of SEQ ID NO: 247. In some embodiments, the RNAi agent has a modified sense strand of SEQ ID NO: 439 conjugated to Formula IV at the 3′ end and a modified antisense strand of SEQ ID NO: 247.

[1167] In some embodiments, the RNAi agent has a modified sense strand of SEQ ID NO: 440 conjugated to Formula IV at the 3′ end. In some embodiments, the RNAi agent has a modified antisense strand of SEQ ID NO: 248. In some embodiments, the RNAi agent has a modified sense strand of SEQ ID NO: 440 conjugated to Formula IV at the 3′ end and a modified antisense strand of SEQ ID NO: 248.

[1168] In some embodiments, the RNAi agent has a modified sense strand of SEQ ID NO: 441 conjugated to Formula IV at the 3′ end. In some embodiments, the RNAi agent has a modified antisense strand of SEQ ID NO: 249. In some embodiments, the RNAi agent has a modified sense strand of SEQ ID NO: 441 conjugated to Formula IV at the 3′ end and a modified antisense strand of SEQ ID NO: 249.

[1169] In some embodiments, the RNAi agent has a modified sense strand of SEQ ID NO: 442 conjugated to Formula IV at the 3′ end. In some embodiments, the RNAi agent has a modified antisense strand of SEQ ID NO: 250. In some embodiments, the RNAi agent has a modified sense strand of SEQ ID NO: 442 conjugated to Formula IV at the 3′ end and a modified antisense strand of SEQ ID NO: 250.

[1170] In some embodiments, the RNAi agent has a modified sense strand of SEQ ID NO: 443 conjugated to Formula IV at the 3′ end. In some embodiments, the RNAi agent has a modified antisense strand of SEQ ID NO: 251. In some embodiments, the RNAi agent has a modified sense strand of SEQ ID NO: 443 conjugated to Formula IV at the 3′ end and a modified antisense strand of SEQ ID NO: 251.

[1171] In some embodiments, the RNAi agent has a modified sense strand of SEQ ID NO: 444 conjugated to Formula IV at the 3′ end. In some embodiments, the RNAi agent has a modified antisense strand of SEQ ID NO: 252. In some embodiments, the RNAi agent has a modified sense strand of SEQ ID NO: 444 conjugated to Formula IV at the 3′ end and a modified antisense strand of SEQ ID NO: 252.

[1172] In some embodiments, the RNAi agent has a modified sense strand of SEQ ID NO: 445 conjugated to Formula IV at the 3′ end. In some embodiments, the RNAi agent has a modified antisense strand of SEQ ID NO: 253. In some embodiments, the RNAi agent has a modified sense strand of SEQ ID NO: 445 conjugated to Formula IV at the 3′ end and a modified antisense strand of SEQ ID NO: 253.

[1173] In some embodiments, the RNAi agent has a modified sense strand of SEQ ID NO: 446 conjugated to Formula IV at the 3′ end. In some embodiments, the RNAi agent has a modified antisense strand of SEQ ID NO: 254. In some embodiments, the RNAi agent has a modified sense strand of SEQ ID NO: 446 conjugated to Formula IV at the 3′ end and a modified antisense strand of SEQ ID NO: 254.

[1174] In some embodiments, the RNAi agent has a modified sense strand of SEQ ID NO: 447 conjugated to Formula IV at the 3′ end. In some embodiments, the RNAi agent has a modified antisense strand of SEQ ID NO: 255. In some embodiments, the RNAi agent has a modified sense strand of SEQ ID NO: 447 conjugated to Formula IV at the 3′ end and a modified antisense strand of SEQ ID NO: 255.

[1175] In some embodiments, the RNAi agent has a modified sense strand of SEQ ID NO: 448 conjugated to Formula IV at the 3′ end. In some embodiments, the RNAi agent has a modified antisense strand of SEQ ID NO: 256. In some embodiments, the RNAi agent has a modified sense strand of SEQ ID NO: 448 conjugated to Formula IV at the 3′ end and a modified antisense strand of SEQ ID NO: 256.

[1176] In some embodiments, the RNAi agent has a modified sense strand of SEQ ID NO: 449 conjugated to Formula IV at the 3′ end. In some embodiments, the RNAi agent has a modified antisense strand of SEQ ID NO: 257. In some embodiments, the RNAi agent has a modified sense strand of SEQ ID NO: 449 conjugated to Formula IV at the 3′ end and a modified antisense strand of SEQ ID NO: 257.

[1177] In some embodiments, the RNAi agent has a modified sense strand of SEQ ID NO: 450 conjugated to Formula IV at the 3′ end. In some embodiments, the RNAi agent has a modified antisense strand of SEQ ID NO: 258. In some embodiments, the RNAi agent has a modified sense strand of SEQ ID NO: 450 conjugated to Formula IV at the 3′ end and a modified antisense strand of SEQ ID NO: 258.

[1178] In some embodiments, the RNAi agent has a modified sense strand of SEQ ID NO: 451 conjugated to Formula IV at the 3′ end. In some embodiments, the RNAi agent has a modified antisense strand of SEQ ID NO: 259. In some embodiments, the RNAi agent has a modified sense strand of SEQ ID NO: 451 conjugated to Formula IV at the 3′ end and a modified antisense strand of SEQ ID NO: 259.

[1179] In some embodiments, the RNAi agent has a modified sense strand of SEQ ID NO: 452 conjugated to Formula IV at the 3′ end. In some embodiments, the RNAi agent has a modified antisense strand of SEQ ID NO: 260. In some embodiments, the RNAi agent has a modified sense strand of SEQ ID NO: 452 conjugated to Formula IV at the 3′ end and a modified antisense strand of SEQ ID NO: 260.

[1180] In some embodiments, the RNAi agent has a modified sense strand of SEQ ID NO: 453 conjugated to Formula IV at the 3′ end. In some embodiments, the RNAi agent has a modified antisense strand of SEQ ID NO: 261. In some embodiments, the RNAi agent has a modified sense strand of SEQ ID NO: 453 conjugated to Formula IV at the 3′ end and a modified antisense strand of SEQ ID NO: 261.

[1181] In some embodiments, the RNAi agent has a modified sense strand of SEQ ID NO: 454 conjugated to Formula IV at the 3′ end. In some embodiments, the RNAi agent has a modified antisense strand of SEQ ID NO: 262. In some embodiments, the RNAi agent has a modified sense strand of SEQ ID NO: 454 conjugated to Formula IV at the 3′ end and a modified antisense strand of SEQ ID NO: 262.

[1182] In some embodiments, the RNAi agent has a modified sense strand of SEQ ID NO: 455 conjugated to Formula IV at the 3′ end. In some embodiments, the RNAi agent has a modified antisense strand of SEQ ID NO: 263. In some embodiments, the RNAi agent has a modified sense strand of SEQ ID NO: 455 conjugated to Formula IV at the 3′ end and a modified antisense strand of SEQ ID NO: 263.

[1183] In some embodiments, the RNAi agent has a modified sense strand of SEQ ID NO: 456 conjugated to Formula IV at the 3′ end. In some embodiments, the RNAi agent has a modified antisense strand of SEQ ID NO: 264. In some embodiments, the RNAi agent has a modified sense strand of SEQ ID NO: 456 conjugated to Formula IV at the 3′ end and a modified antisense strand of SEQ ID NO: 264.

[1184] In some embodiments, the RNAi agent has a modified sense strand of SEQ ID NO: 457 conjugated to Formula IV at the 3′ end. In some embodiments, the RNAi agent has a modified antisense strand of SEQ ID NO: 265. In some embodiments, the RNAi agent has a modified sense strand of SEQ ID NO: 457 conjugated to Formula IV at the 3′ end and a modified antisense strand of SEQ ID NO: 265.

[1185] In some embodiments, the RNAi agent has a modified sense strand of SEQ ID NO: 458 conjugated to Formula IV at the 3′ end. In some embodiments, the RNAi agent has a modified antisense strand of SEQ ID NO: 266. In some embodiments, the RNAi agent has a modified sense strand of SEQ ID NO: 458 conjugated to Formula IV at the 3′ end and a modified antisense strand of SEQ ID NO: 266.

[1186] In some embodiments, the RNAi agent has a modified sense strand of SEQ ID NO: 459 conjugated to Formula IV at the 3′ end. In some embodiments, the RNAi agent has a modified antisense strand of SEQ ID NO: 267. In some embodiments, the RNAi agent has a modified sense strand of SEQ ID NO: 459 conjugated to Formula IV at the 3′ end and a modified antisense strand of SEQ ID NO: 267.

[1187] In some embodiments, the RNAi agent has a modified sense strand of SEQ ID NO: 460 conjugated to Formula IV at the 3′ end. In some embodiments, the RNAi agent has a modified antisense strand of SEQ ID NO: 268. In some embodiments, the RNAi agent has a modified sense strand of SEQ ID NO: 460 conjugated to Formula IV at the 3′ end and a modified antisense strand of SEQ ID NO: 268.

[1188] In some embodiments, the RNAi agent has a modified sense strand of SEQ ID NO: 461 conjugated to Formula IV at the 3′ end. In some embodiments, the RNAi agent has a modified antisense strand of SEQ ID NO: 269. In some embodiments, the RNAi agent has a modified sense strand of SEQ ID NO: 461 conjugated to Formula IV at the 3′ end and a modified antisense strand of SEQ ID NO: 269.

[1189] In some embodiments, the RNAi agent has a modified sense strand of SEQ ID NO: 462 conjugated to Formula IV at the 3′ end. In some embodiments, the RNAi agent has a modified antisense strand of SEQ ID NO: 270. In some embodiments, the RNAi agent has a modified sense strand of SEQ ID NO: 462 conjugated to Formula IV at the 3′ end and a modified antisense strand of SEQ ID NO: 270.

[1190] In some embodiments, the RNAi agent has a modified sense strand of SEQ ID NO: 463 conjugated to Formula IV at the 3′ end. In some embodiments, the RNAi agent has a modified antisense strand of SEQ ID NO: 271. In some embodiments, the RNAi agent has a modified sense strand of SEQ ID NO: 463 conjugated to Formula IV at the 3′ end and a modified antisense strand of SEQ ID NO: 271.

[1191] In some embodiments, the RNAi agent has a modified sense strand of SEQ ID NO: 464 conjugated to Formula IV at the 3′ end. In some embodiments, the RNAi agent has a modified antisense strand of SEQ ID NO: 272. In some embodiments, the RNAi agent has a modified sense strand of SEQ ID NO: 464 conjugated to Formula IV at the 3′ end and a modified antisense strand of SEQ ID NO: 272.

[1192] In some embodiments, the RNAi agent has a modified sense strand of SEQ ID NO: 465 conjugated to Formula IV at the 3′ end. In some embodiments, the RNAi agent has a modified antisense strand of SEQ ID NO: 273. In some embodiments, the RNAi agent has a modified sense strand of SEQ ID NO: 465 conjugated to Formula IV at the 3′ end and a modified antisense strand of SEQ ID NO: 273.

[1193] In some embodiments, the RNAi agent has a modified sense strand of SEQ ID NO: 466 conjugated to Formula IV at the 3′ end. In some embodiments, the RNAi agent has a modified antisense strand of SEQ ID NO: 274. In some embodiments, the RNAi agent has a modified sense strand of SEQ ID NO: 466 conjugated to Formula IV at the 3′ end and a modified antisense strand of SEQ ID NO: 274.

[1194] In some embodiments, the RNAi agent has a modified sense strand of SEQ ID NO: 467 conjugated to Formula IV at the 3′ end. In some embodiments, the RNAi agent has a modified antisense strand of SEQ ID NO: 275. In some embodiments, the RNAi agent has a modified sense strand of SEQ ID NO: 467 conjugated to Formula IV at the 3′ end and a modified antisense strand of SEQ ID NO: 275.

[1195] In some embodiments, the RNAi agent has a modified sense strand of SEQ ID NO: 468 conjugated to Formula IV at the 3′ end. In some embodiments, the RNAi agent has a modified antisense strand of SEQ ID NO: 276. In some embodiments, the RNAi agent has a modified sense strand of SEQ ID NO: 468 conjugated to Formula IV at the 3′ end and a modified antisense strand of SEQ ID NO: 276.

[1196] In some embodiments, the RNAi agent has a modified sense strand of SEQ ID NO: 469 conjugated to Formula IV at the 3′ end. In some embodiments, the RNAi agent has a modified antisense strand of SEQ ID NO: 277. In some embodiments, the RNAi agent has a modified sense strand of SEQ ID NO: 469 conjugated to Formula IV at the 3′ end and a modified antisense strand of SEQ ID NO: 277.

[1197] In some embodiments, the RNAi agent has a modified sense strand of SEQ ID NO: 470 conjugated to Formula IV at the 3′ end. In some embodiments, the RNAi agent has a modified antisense strand of SEQ ID NO: 278. In some embodiments, the RNAi agent has a modified sense strand of SEQ ID NO: 470 conjugated to Formula IV at the 3′ end and a modified antisense strand of SEQ ID NO: 278.

[1198] In some embodiments, the RNAi agent has a modified sense strand of SEQ ID NO: 471 conjugated to Formula IV at the 3′ end. In some embodiments, the RNAi agent has a modified antisense strand of SEQ ID NO: 279. In some embodiments, the RNAi agent has a modified sense strand of SEQ ID NO: 471 conjugated to Formula IV at the 3′ end and a modified antisense strand of SEQ ID NO: 279.

[1199] In some embodiments, the RNAi agent has a modified sense strand of SEQ ID NO: 472 conjugated to Formula IV at the 3′ end. In some embodiments, the RNAi agent has a modified antisense strand of SEQ ID NO: 280. In some embodiments, the RNAi agent has a modified sense strand of SEQ ID NO: 472 conjugated to Formula IV at the 3′ end and a modified antisense strand of SEQ ID NO: 280.

[1200] In some embodiments, the RNAi agent has a modified sense strand of SEQ ID NO: 473 conjugated to Formula IV at the 3′ end. In some embodiments, the RNAi agent has a modified antisense strand of SEQ ID NO: 281. In some embodiments, the RNAi agent has a modified sense strand of SEQ ID NO: 473 conjugated to Formula IV at the 3′ end and a modified antisense strand of SEQ ID NO: 281.

[1201] In some embodiments, the RNAi agent has a modified sense strand of SEQ ID NO: 474 conjugated to Formula IV at the 3′ end. In some embodiments, the RNAi agent has a modified antisense strand of SEQ ID NO: 282. In some embodiments, the RNAi agent has a modified sense strand of SEQ ID NO: 474 conjugated to Formula IV at the 3′ end and a modified antisense strand of SEQ ID NO: 282.

[1202] In some embodiments, the RNAi agent has a modified sense strand of SEQ ID NO: 475 conjugated to Formula IV at the 3′ end. In some embodiments, the RNAi agent has a modified antisense strand of SEQ ID NO: 283. In some embodiments, the RNAi agent has a modified sense strand of SEQ ID NO: 475 conjugated to Formula IV at the 3′ end and a modified antisense strand of SEQ ID NO: 283.

[1203] In some embodiments, the RNAi agent has a modified sense strand of SEQ ID NO: 476 conjugated to Formula IV at the 3′ end. In some embodiments, the RNAi agent has a modified antisense strand of SEQ ID NO: 284. In some embodiments, the RNAi agent has a modified sense strand of SEQ ID NO: 476 conjugated to Formula IV at the 3′ end and a modified antisense strand of SEQ ID NO: 284.

[1204] In some embodiments, the RNAi agent has a modified sense strand of SEQ ID NO: 477 conjugated to Formula IV at the 3′ end. In some embodiments, the RNAi agent has a modified antisense strand of SEQ ID NO: 285. In some embodiments, the RNAi agent has a modified sense strand of SEQ ID NO: 477 conjugated to Formula IV at the 3′ end and a modified antisense strand of SEQ ID NO: 285.

[1205] In some embodiments, the RNAi agent has a modified sense strand of SEQ ID NO: 478 conjugated to Formula IV at the 3′ end. In some embodiments, the RNAi agent has a modified antisense strand of SEQ ID NO: 286. In some embodiments, the RNAi agent has a modified sense strand of SEQ ID NO: 478 conjugated to Formula IV at the 3′ end and a modified antisense strand of SEQ ID NO: 286.

[1206] In some embodiments, the RNAi agent has a modified sense strand of SEQ ID NO: 479 conjugated to Formula IV at the 3′ end. In some embodiments, the RNAi agent has a modified antisense strand of SEQ ID NO: 287. In some embodiments, the RNAi agent has a modified sense strand of SEQ ID NO: 479 conjugated to Formula IV at the 3′ end and a modified antisense strand of SEQ ID NO: 287.

[1207] In some embodiments, the RNAi agent has a modified sense strand of SEQ ID NO: 480 conjugated to Formula IV at the 3′ end. In some embodiments, the RNAi agent has a modified antisense strand of SEQ ID NO: 288. In some embodiments, the RNAi agent has a modified sense strand of SEQ ID NO: 480 conjugated to Formula IV at the 3′ end and a modified antisense strand of SEQ ID NO: 288.

[1208] In some embodiments, the modified sense strand of the RNAi agent is conjugated to the targeting ligand and linking group of Formula V.

[1209] In some embodiments, the RNAi agent has a modified sense strand of SEQ ID NO: 385 conjugated to Formula V at the 3′ end. In some embodiments, the RNAi agent has a modified antisense strand of SEQ ID NO: 193. In some embodiments, the RNAi agent has a modified sense strand of SEQ ID NO: 385 conjugated to Formula V at the 3′ end and a modified antisense strand of SEQ ID NO: 193.

[1210] In some embodiments, the RNAi agent has a modified sense strand of SEQ ID NO: 386 conjugated to Formula V at the 3′ end. In some embodiments, the RNAi agent has a modified antisense strand of SEQ ID NO: 194. In some embodiments, the RNAi agent has a modified sense strand of SEQ ID NO: 386 conjugated to Formula V at the 3′ end and a modified antisense strand of SEQ ID NO: 194.

[1211] In some embodiments, the RNAi agent has a modified sense strand of SEQ ID NO: 387 conjugated to Formula V at the 3′ end. In some embodiments, the RNAi agent has a modified antisense strand of SEQ ID NO: 195. In some embodiments, the RNAi agent has a modified sense strand of SEQ ID NO: 387 conjugated to Formula V at the 3′ end and a modified antisense strand of SEQ ID NO: 195.

[1212] In some embodiments, the RNAi agent has a modified sense strand of SEQ ID NO: 388 conjugated to Formula V at the 3′ end. In some embodiments, the RNAi agent has a modified antisense strand of SEQ ID NO: 196. In some embodiments, the RNAi agent has a modified sense strand of SEQ ID NO: 388 conjugated to Formula V at the 3′ end and a modified antisense strand of SEQ ID NO: 196.

[1213] In some embodiments, the RNAi agent has a modified sense strand of SEQ ID NO: 389 conjugated to Formula V at the 3′ end. In some embodiments, the RNAi agent has a modified antisense strand of SEQ ID NO: 197. In some embodiments, the RNAi agent has a modified sense strand of SEQ ID NO: 389 conjugated to Formula V at the 3′ end and a modified antisense strand of SEQ ID NO: 197.

[1214] In some embodiments, the RNAi agent has a modified sense strand of SEQ ID NO: 390 conjugated to Formula V at the 3′ end. In some embodiments, the RNAi agent has a modified antisense strand of SEQ ID NO: 198. In some embodiments, the RNAi agent has a modified sense strand of SEQ ID NO: 390 conjugated to Formula V at the 3′ end and a modified antisense strand of SEQ ID NO: 198.

[1215] In some embodiments, the RNAi agent has a modified sense strand of SEQ ID NO: 391 conjugated to Formula V at the 3′ end. In some embodiments, the RNAi agent has a modified antisense strand of SEQ ID NO: 199. In some embodiments, the RNAi agent has a modified sense strand of SEQ ID NO: 391 conjugated to Formula V at the 3′ end and a modified antisense strand of SEQ ID NO: 199.

[1216] In some embodiments, the RNAi agent has a modified sense strand of SEQ ID NO: 392 conjugated to Formula V at the 3′ end. In some embodiments, the RNAi agent has a modified antisense strand of SEQ ID NO: 200. In some embodiments, the RNAi agent has a modified sense strand of SEQ ID NO: 392 conjugated to Formula V at the 3′ end and a modified antisense strand of SEQ ID NO: 200.

[1217] In some embodiments, the RNAi agent has a modified sense strand of SEQ ID NO: 393 conjugated to Formula V at the 3′ end. In some embodiments, the RNAi agent has a modified antisense strand of SEQ ID NO: 201. In some embodiments, the RNAi agent has a modified sense strand of SEQ ID NO: 393 conjugated to Formula V at the 3′ end and a modified antisense strand of SEQ ID NO: 201.

[1218] In some embodiments, the RNAi agent has a modified sense strand of SEQ ID NO: 394 conjugated to Formula V at the 3′ end. In some embodiments, the RNAi agent has a modified antisense strand of SEQ ID NO: 202. In some embodiments, the RNAi agent has a modified sense strand of SEQ ID NO: 394 conjugated to Formula V at the 3′ end and a modified antisense strand of SEQ ID NO: 202.

[1219] In some embodiments, the RNAi agent has a modified sense strand of SEQ ID NO: 395 conjugated to Formula V at the 3′ end. In some embodiments, the RNAi agent has a modified antisense strand of SEQ ID NO: 203. In some embodiments, the RNAi agent has a modified sense strand of SEQ ID NO: 395 conjugated to Formula V at the 3′ end and a modified antisense strand of SEQ ID NO: 203.

[1220] In some embodiments, the RNAi agent has a modified sense strand of SEQ ID NO: 396 conjugated to Formula V at the 3′ end. In some embodiments, the RNAi agent has a modified antisense strand of SEQ ID NO: 204. In some embodiments, the RNAi agent has a modified sense strand of SEQ ID NO: 306 conjugated to Formula V at the 3′ end and a modified antisense strand of SEQ ID NO: 204.

[1221] In some embodiments, the RNAi agent has a modified sense strand of SEQ ID NO: 397 conjugated to Formula V at the 3′ end. In some embodiments, the RNAi agent has a modified antisense strand of SEQ ID NO: 205. In some embodiments, the RNAi agent has a modified sense strand of SEQ ID NO: 397 conjugated to Formula V at the 3′ end and a modified antisense strand of SEQ ID NO: 205.

[1222] In some embodiments, the RNAi agent has a modified sense strand of SEQ ID NO: 398 conjugated to Formula V at the 3′ end. In some embodiments, the RNAi agent has a modified antisense strand of SEQ ID NO: 206. In some embodiments, the RNAi agent has a modified sense strand of SEQ ID NO: 398 conjugated to Formula V at the 3′ end and a modified antisense strand of SEQ ID NO: 206.

[1223] In some embodiments, the RNAi agent has a modified sense strand of SEQ ID NO: 399 conjugated to Formula V at the 3′ end. In some embodiments, the RNAi agent has a modified antisense strand of SEQ ID NO: 207. In some embodiments, the RNAi agent has a modified sense strand of SEQ ID NO: 399 conjugated to Formula V at the 3′ end and a modified antisense strand of SEQ ID NO: 207.

[1224] In some embodiments, the RNAi agent has a modified sense strand of SEQ ID NO: 400 conjugated to Formula V at the 3′ end. In some embodiments, the RNAi agent has a modified antisense strand of SEQ ID NO: 208. In some embodiments, the RNAi agent has a modified sense strand of SEQ ID NO: 400 conjugated to Formula V at the 3′ end and a modified antisense strand of SEQ ID NO: 208.

[1225] In some embodiments, the RNAi agent has a modified sense strand of SEQ ID NO: 401 conjugated to Formula V at the 3′ end. In some embodiments, the RNAi agent has a modified antisense strand of SEQ ID NO: 209. In some embodiments, the RNAi agent has a modified sense strand of SEQ ID NO: 401 conjugated to Formula V at the 3′ end and a modified antisense strand of SEQ ID NO: 209.

[1226] In some embodiments, the RNAi agent has a modified sense strand of SEQ ID NO: 402 conjugated to Formula V at the 3′ end. In some embodiments, the RNAi agent has a modified antisense strand of SEQ ID NO: 210. In some embodiments, the RNAi agent has a modified sense strand of SEQ ID NO: 402 conjugated to Formula V at the 3′ end and a modified antisense strand of SEQ ID NO: 210.

[1227] In some embodiments, the RNAi agent has a modified sense strand of SEQ ID NO: 403 conjugated to Formula V at the 3′ end. In some embodiments, the RNAi agent has a modified antisense strand of SEQ ID NO: 211. In some embodiments, the RNAi agent has a modified sense strand of SEQ ID NO: 403 conjugated to Formula V at the 3′ end and a modified antisense strand of SEQ ID NO: 211.

[1228] In some embodiments, the RNAi agent has a modified sense strand of SEQ ID NO: 404 conjugated to Formula V at the 3′ end. In some embodiments, the RNAi agent has a modified antisense strand of SEQ ID NO: 212. In some embodiments, the RNAi agent has a modified sense strand of SEQ ID NO: 404 conjugated to Formula V at the 3′ end and a modified antisense strand of SEQ ID NO: 212.

[1229] In some embodiments, the RNAi agent has a modified sense strand of SEQ ID NO: 405 conjugated to Formula V at the 3′ end. In some embodiments, the RNAi agent has a modified antisense strand of SEQ ID NO: 213. In some embodiments, the RNAi agent has a modified sense strand of SEQ ID NO: 405 conjugated to Formula V at the 3′ end and a modified antisense strand of SEQ ID NO: 213.

[1230] In some embodiments, the RNAi agent has a modified sense strand of SEQ ID NO: 406 conjugated to Formula V at the 3′ end. In some embodiments, the RNAi agent has a modified antisense strand of SEQ ID NO: 214. In some embodiments, the RNAi agent has a modified sense strand of SEQ ID NO: 406 conjugated to Formula V at the 3′ end and a modified antisense strand of SEQ ID NO: 214.

[1231] In some embodiments, the RNAi agent has a modified sense strand of SEQ ID NO: 407 conjugated to Formula V at the 3′ end. In some embodiments, the RNAi agent has a modified antisense strand of SEQ ID NO: 215. In some embodiments, the RNAi agent has a modified sense strand of SEQ ID NO: 407 conjugated to Formula V at the 3′ end and a modified antisense strand of SEQ ID NO: 215.

[1232] In some embodiments, the RNAi agent has a modified sense strand of SEQ ID NO: 408 conjugated to Formula V at the 3′ end. In some embodiments, the RNAi agent has a modified antisense strand of SEQ ID NO: 216. In some embodiments, the RNAi agent has a modified sense strand of SEQ ID NO: 408 conjugated to Formula V at the 3′ end and a modified antisense strand of SEQ ID NO: 216.

[1233] In some embodiments, the RNAi agent has a modified sense strand of SEQ ID NO: 409 conjugated to Formula V at the 3′ end. In some embodiments, the RNAi agent has a modified antisense strand of SEQ ID NO: 217. In some embodiments, the RNAi agent has a modified sense strand of SEQ ID NO: 409 conjugated to Formula V at the 3′ end and a modified antisense strand of SEQ ID NO: 217.

[1234] In some embodiments, the RNAi agent has a modified sense strand of SEQ ID NO: 410 conjugated to Formula V at the 3′ end. In some embodiments, the RNAi agent has a modified antisense strand of SEQ ID NO: 218. In some embodiments, the RNAi agent has a modified sense strand of SEQ ID NO: 410 conjugated to Formula V at the 3′ end and a modified antisense strand of SEQ ID NO: 218.

[1235] In some embodiments, the RNAi agent has a modified sense strand of SEQ ID NO: 411 conjugated to Formula V at the 3′ end. In some embodiments, the RNAi agent has a modified antisense strand of SEQ ID NO: 219. In some embodiments, the RNAi agent has a modified sense strand of SEQ ID NO: 411 conjugated to Formula V at the 3′ end and a modified antisense strand of SEQ ID NO: 219.

[1236] In some embodiments, the RNAi agent has a modified sense strand of SEQ ID NO: 412 conjugated to Formula V at the 3′ end. In some embodiments, the RNAi agent has a modified antisense strand of SEQ ID NO: 220. In some embodiments, the RNAi agent has a modified sense strand of SEQ ID NO: 412 conjugated to Formula V at the 3′ end and a modified antisense strand of SEQ ID NO: 220.

[1237] In some embodiments, the RNAi agent has a modified sense strand of SEQ ID NO: 413 conjugated to Formula V at the 3′ end. In some embodiments, the RNAi agent has a modified antisense strand of SEQ ID NO: 221. In some embodiments, the RNAi agent has a modified sense strand of SEQ ID NO: 413 conjugated to Formula V at the 3′ end and a modified antisense strand of SEQ ID NO: 221.

[1238] In some embodiments, the RNAi agent has a modified sense strand of SEQ ID NO: 414 conjugated to Formula V at the 3′ end. In some embodiments, the RNAi agent has a modified antisense strand of SEQ ID NO: 222. In some embodiments, the RNAi agent has a modified sense strand of SEQ ID NO: 414 conjugated to Formula V at the 3′ end and a modified antisense strand of SEQ ID NO: 222.

[1239] In some embodiments, the RNAi agent has a modified sense strand of SEQ ID NO: 415 conjugated to Formula V at the 3′ end. In some embodiments, the RNAi agent has a modified antisense strand of SEQ ID NO: 223. In some embodiments, the RNAi agent has a modified sense strand of SEQ ID NO: 415 conjugated to Formula V at the 3′ end and a modified antisense strand of SEQ ID NO: 223.

[1240] In some embodiments, the RNAi agent has a modified sense strand of SEQ ID NO: 416 conjugated to Formula V at the 3′ end. In some embodiments, the RNAi agent has a modified antisense strand of SEQ ID NO: 224. In some embodiments, the RNAi agent has a modified sense strand of SEQ ID NO: 416 conjugated to Formula V at the 3′ end and a modified antisense strand of SEQ ID NO: 224.

[1241] In some embodiments, the RNAi agent has a modified sense strand of SEQ ID NO: 417 conjugated to Formula V at the 3′ end. In some embodiments, the RNAi agent has a modified antisense strand of SEQ ID NO: 225. In some embodiments, the RNAi agent has a modified sense strand of SEQ ID NO: 417 conjugated to Formula V at the 3′ end and a modified antisense strand of SEQ ID NO: 225.

[1242] In some embodiments, the RNAi agent has a modified sense strand of SEQ ID NO: 418 conjugated to Formula V at the 3′ end. In some embodiments, the RNAi agent has a modified antisense strand of SEQ ID NO: 226. In some embodiments, the RNAi agent has a modified sense strand of SEQ ID NO: 418 conjugated to Formula V at the 3′ end and a modified antisense strand of SEQ ID NO: 226.

[1243] In some embodiments, the RNAi agent has a modified sense strand of SEQ ID NO: 419 conjugated to Formula V at the 3′ end. In some embodiments, the RNAi agent has a modified antisense strand of SEQ ID NO: 227. In some embodiments, the RNAi agent has a modified sense strand of SEQ ID NO: 419 conjugated to Formula V at the 3′ end and a modified antisense strand of SEQ ID NO: 227.

[1244] In some embodiments, the RNAi agent has a modified sense strand of SEQ ID NO: 420 conjugated to Formula V at the 3′ end. In some embodiments, the RNAi agent has a modified antisense strand of SEQ ID NO: 228. In some embodiments, the RNAi agent has a modified sense strand of SEQ ID NO: 420 conjugated to Formula V at the 3′ end and a modified antisense strand of SEQ ID NO: 228.

[1245] In some embodiments, the RNAi agent has a modified sense strand of SEQ ID NO: 421 conjugated to Formula V at the 3′ end. In some embodiments, the RNAi agent has a modified antisense strand of SEQ ID NO: 229. In some embodiments, the RNAi agent has a modified sense strand of SEQ ID NO: 421 conjugated to Formula V at the 3′ end and a modified antisense strand of SEQ ID NO: 229.

[1246] In some embodiments, the RNAi agent has a modified sense strand of SEQ ID NO: 422 conjugated to Formula V at the 3′ end. In some embodiments, the RNAi agent has a modified antisense strand of SEQ ID NO: 230. In some embodiments, the RNAi agent has a modified sense strand of SEQ ID NO: 422 conjugated to Formula V at the 3′ end and a modified antisense strand of SEQ ID NO: 230.

[1247] In some embodiments, the RNAi agent has a modified sense strand of SEQ ID NO: 423 conjugated to Formula V at the 3′ end. In some embodiments, the RNAi agent has a modified antisense strand of SEQ ID NO: 231. In some embodiments, the RNAi agent has a modified sense strand of SEQ ID NO: 423 conjugated to Formula V at the 3′ end and a modified antisense strand of SEQ ID NO: 231.

[1248] In some embodiments, the RNAi agent has a modified sense strand of SEQ ID NO: 424 conjugated to Formula V at the 3′ end. In some embodiments, the RNAi agent has a modified antisense strand of SEQ ID NO: 232. In some embodiments, the RNAi agent has a modified sense strand of SEQ ID NO: 424 conjugated to Formula V at the 3′ end and a modified antisense strand of SEQ ID NO: 232.

[1249] In some embodiments, the RNAi agent has a modified sense strand of SEQ ID NO: 425 conjugated to Formula V at the 3′ end. In some embodiments, the RNAi agent has a modified antisense strand of SEQ ID NO: 233. In some embodiments, the RNAi agent has a modified sense strand of SEQ ID NO: 425 conjugated to Formula V at the 3′ end and a modified antisense strand of SEQ ID NO: 233.

[1250] In some embodiments, the RNAi agent has a modified sense strand of SEQ ID NO: 426 conjugated to Formula V at the 3′ end. In some embodiments, the RNAi agent has a modified antisense strand of SEQ ID NO: 234. In some embodiments, the RNAi agent has a modified sense strand of SEQ ID NO: 426 conjugated to Formula V at the 3′ end and a modified antisense strand of SEQ ID NO: 234.

[1251] In some embodiments, the RNAi agent has a modified sense strand of SEQ ID NO: 427 conjugated to Formula V at the 3′ end. In some embodiments, the RNAi agent has a modified antisense strand of SEQ ID NO: 235. In some embodiments, the RNAi agent has a modified sense strand of SEQ ID NO: 427 conjugated to Formula V at the 3′ end and a modified antisense strand of SEQ ID NO: 235.

[1252] In some embodiments, the RNAi agent has a modified sense strand of SEQ ID NO: 428 conjugated to Formula V at the 3′ end. In some embodiments, the RNAi agent has a modified antisense strand of SEQ ID NO: 236. In some embodiments, the RNAi agent has a modified sense strand of SEQ ID NO: 428 conjugated to Formula V at the 3′ end and a modified antisense strand of SEQ ID NO: 236.

[1253] In some embodiments, the RNAi agent has a modified sense strand of SEQ ID NO: 429 conjugated to Formula V at the 3′ end. In some embodiments, the RNAi agent has a modified antisense strand of SEQ ID NO: 237. In some embodiments, the RNAi agent has a modified sense strand of SEQ ID NO: 429 conjugated to Formula V at the 3′ end and a modified antisense strand of SEQ ID NO: 237.

[1254] In some embodiments, the RNAi agent has a modified sense strand of SEQ ID NO: 430 conjugated to Formula V at the 3′ end. In some embodiments, the RNAi agent has a modified antisense strand of SEQ ID NO: 238. In some embodiments, the RNAi agent has a modified sense strand of SEQ ID NO: 430 conjugated to Formula V at the 3′ end and a modified antisense strand of SEQ ID NO: 238.

[1255] In some embodiments, the RNAi agent has a modified sense strand of SEQ ID NO: 431 conjugated to Formula V at the 3′ end. In some embodiments, the RNAi agent has a modified antisense strand of SEQ ID NO: 239. In some embodiments, the RNAi agent has a modified sense strand of SEQ ID NO: 431 conjugated to Formula V at the 3′ end and a modified antisense strand of SEQ ID NO: 239.

[1256] In some embodiments, the RNAi agent has a modified sense strand of SEQ ID NO: 432 conjugated to Formula V at the 3′ end. In some embodiments, the RNAi agent has a modified antisense strand of SEQ ID NO: 240. In some embodiments, the RNAi agent has a modified sense strand of SEQ ID NO: 432 conjugated to Formula V at the 3′ end and a modified antisense strand of SEQ ID NO: 240.

[1257] In some embodiments, the RNAi agent has a modified sense strand of SEQ ID NO: 433 conjugated to Formula V at the 3′ end. In some embodiments, the RNAi agent has a modified antisense strand of SEQ ID NO: 241. In some embodiments, the RNAi agent has a modified sense strand of SEQ ID NO: 433 conjugated to Formula V at the 3′ end and a modified antisense strand of SEQ ID NO: 241.

[1258] In some embodiments, the RNAi agent has a modified sense strand of SEQ ID NO: 434 conjugated to Formula V at the 3′ end. In some embodiments, the RNAi agent has a modified antisense strand of SEQ ID NO: 242. In some embodiments, the RNAi agent has a modified sense strand of SEQ ID NO: 434 conjugated to Formula V at the 3′ end and a modified antisense strand of SEQ ID NO: 242.

[1259] In some embodiments, the RNAi agent has a modified sense strand of SEQ ID NO: 435 conjugated to Formula V at the 3′ end. In some embodiments, the RNAi agent has a modified antisense strand of SEQ ID NO: 243. In some embodiments, the RNAi agent has a modified sense strand of SEQ ID NO: 435 conjugated to Formula V at the 3′ end and a modified antisense strand of SEQ ID NO: 243.

[1260] In some embodiments, the RNAi agent has a modified sense strand of SEQ ID NO: 436 conjugated to Formula V at the 3′ end. In some embodiments, the RNAi agent has a modified antisense strand of SEQ ID NO: 244. In some embodiments, the RNAi agent has a modified sense strand of SEQ ID NO: 436 conjugated to Formula V at the 3′ end and a modified antisense strand of SEQ ID NO: 244.

[1261] In some embodiments, the RNAi agent has a modified sense strand of SEQ ID NO: 437 conjugated to Formula V at the 3′ end. In some embodiments, the RNAi agent has a modified antisense strand of SEQ ID NO: 245. In some embodiments, the RNAi agent has a modified sense strand of SEQ ID NO: 437 conjugated to Formula V at the 3′ end and a modified antisense strand of SEQ ID NO: 245.

[1262] In some embodiments, the RNAi agent has a modified sense strand of SEQ ID NO: 438 conjugated to Formula V at the 3′ end. In some embodiments, the RNAi agent has a modified antisense strand of SEQ ID NO: 246. In some embodiments, the RNAi agent has a modified sense strand of SEQ ID NO: 438 conjugated to Formula V at the 3′ end and a modified antisense strand of SEQ ID NO: 246.

[1263] In some embodiments, the RNAi agent has a modified sense strand of SEQ ID NO: 439 conjugated to Formula V at the 3′ end. In some embodiments, the RNAi agent has a modified antisense strand of SEQ ID NO: 247. In some embodiments, the RNAi agent has a modified sense strand of SEQ ID NO: 439 conjugated to Formula V at the 3′ end and a modified antisense strand of SEQ ID NO: 247.

[1264] In some embodiments, the RNAi agent has a modified sense strand of SEQ ID NO: 440 conjugated to Formula V at the 3′ end. In some embodiments, the RNAi agent has a modified antisense strand of SEQ ID NO: 248. In some embodiments, the RNAi agent has a modified sense strand of SEQ ID NO: 440 conjugated to Formula V at the 3′ end and a modified antisense strand of SEQ ID NO: 248.

[1265] In some embodiments, the RNAi agent has a modified sense strand of SEQ ID NO: 441 conjugated to Formula V at the 3′ end. In some embodiments, the RNAi agent has a modified antisense strand of SEQ ID NO: 249. In some embodiments, the RNAi agent has a modified sense strand of SEQ ID NO: 441 conjugated to Formula V at the 3′ end and a modified antisense strand of SEQ ID NO: 249.

[1266] In some embodiments, the RNAi agent has a modified sense strand of SEQ ID NO: 442 conjugated to Formula V at the 3′ end. In some embodiments, the RNAi agent has a modified antisense strand of SEQ ID NO: 250. In some embodiments, the RNAi agent has a modified sense strand of SEQ ID NO: 442 conjugated to Formula V at the 3′ end and a modified antisense strand of SEQ ID NO: 250.

[1267] In some embodiments, the RNAi agent has a modified sense strand of SEQ ID NO: 443 conjugated to Formula V at the 3′ end. In some embodiments, the RNAi agent has a modified antisense strand of SEQ ID NO: 251. In some embodiments, the RNAi agent has a modified sense strand of SEQ ID NO: 443 conjugated to Formula V at the 3′ end and a modified antisense strand of SEQ ID NO: 251.

[1268] In some embodiments, the RNAi agent has a modified sense strand of SEQ ID NO: 444 conjugated to Formula V at the 3′ end. In some embodiments, the RNAi agent has a modified antisense strand of SEQ ID NO: 252. In some embodiments, the RNAi agent has a modified sense strand of SEQ ID NO: 444 conjugated to Formula V at the 3′ end and a modified antisense strand of SEQ ID NO: 252.

[1269] In some embodiments, the RNAi agent has a modified sense strand of SEQ ID NO: 445 conjugated to Formula V at the 3′ end. In some embodiments, the RNAi agent has a modified antisense strand of SEQ ID NO: 253. In some embodiments, the RNAi agent has a modified sense strand of SEQ ID NO: 445 conjugated to Formula V at the 3′ end and a modified antisense strand of SEQ ID NO: 253.

[1270] In some embodiments, the RNAi agent has a modified sense strand of SEQ ID NO: 446 conjugated to Formula V at the 3′ end. In some embodiments, the RNAi agent has a modified antisense strand of SEQ ID NO: 254. In some embodiments, the RNAi agent has a modified sense strand of SEQ ID NO: 446 conjugated to Formula V at the 3′ end and a modified antisense strand of SEQ ID NO: 254.

[1271] In some embodiments, the RNAi agent has a modified sense strand of SEQ ID NO: 447 conjugated to Formula V at the 3′ end. In some embodiments, the RNAi agent has a modified antisense strand of SEQ ID NO: 255. In some embodiments, the RNAi agent has a modified sense strand of SEQ ID NO: 447 conjugated to Formula V at the 3′ end and a modified antisense strand of SEQ ID NO: 255.

[1272] In some embodiments, the RNAi agent has a modified sense strand of SEQ ID NO: 448 conjugated to Formula V at the 3′ end. In some embodiments, the RNAi agent has a modified antisense strand of SEQ ID NO: 256. In some embodiments, the RNAi agent has a modified sense strand of SEQ ID NO: 448 conjugated to Formula V at the 3′ end and a modified antisense strand of SEQ ID NO: 256.

[1273] In some embodiments, the RNAi agent has a modified sense strand of SEQ ID NO: 449 conjugated to Formula V at the 3′ end. In some embodiments, the RNAi agent has a modified antisense strand of SEQ ID NO: 257. In some embodiments, the RNAi agent has a modified sense strand of SEQ ID NO: 449 conjugated to Formula V at the 3′ end and a modified antisense strand of SEQ ID NO: 257.

[1274] In some embodiments, the RNAi agent has a modified sense strand of SEQ ID NO: 450 conjugated to Formula V at the 3′ end. In some embodiments, the RNAi agent has a modified antisense strand of SEQ ID NO: 258. In some embodiments, the RNAi agent has a modified sense strand of SEQ ID NO: 450 conjugated to Formula V at the 3′ end and a modified antisense strand of SEQ ID NO: 258.

[1275] In some embodiments, the RNAi agent has a modified sense strand of SEQ ID NO: 451 conjugated to Formula V at the 3′ end. In some embodiments, the RNAi agent has a modified antisense strand of SEQ ID NO: 259. In some embodiments, the RNAi agent has a modified sense strand of SEQ ID NO: 451 conjugated to Formula V at the 3′ end and a modified antisense strand of SEQ ID NO: 259.

[1276] In some embodiments, the RNAi agent has a modified sense strand of SEQ ID NO: 452 conjugated to Formula V at the 3′ end. In some embodiments, the RNAi agent has a modified antisense strand of SEQ ID NO: 260. In some embodiments, the RNAi agent has a modified sense strand of SEQ ID NO: 452 conjugated to Formula V at the 3′ end and a modified antisense strand of SEQ ID NO: 260.

[1277] In some embodiments, the RNAi agent has a modified sense strand of SEQ ID NO: 453 conjugated to Formula V at the 3′ end. In some embodiments, the RNAi agent has a modified antisense strand of SEQ ID NO: 261. In some embodiments, the RNAi agent has a modified sense strand of SEQ ID NO: 453 conjugated to Formula V at the 3′ end and a modified antisense strand of SEQ ID NO: 261.

[1278] In some embodiments, the RNAi agent has a modified sense strand of SEQ ID NO: 454 conjugated to Formula V at the 3′ end. In some embodiments, the RNAi agent has a modified antisense strand of SEQ ID NO: 262. In some embodiments, the RNAi agent has a modified sense strand of SEQ ID NO: 454 conjugated to Formula V at the 3′ end and a modified antisense strand of SEQ ID NO: 262.

[1279] In some embodiments, the RNAi agent has a modified sense strand of SEQ ID NO: 455 conjugated to Formula V at the 3′ end. In some embodiments, the RNAi agent has a modified antisense strand of SEQ ID NO: 263. In some embodiments, the RNAi agent has a modified sense strand of SEQ ID NO: 455 conjugated to Formula V at the 3′ end and a modified antisense strand of SEQ ID NO: 263.

[1280] In some embodiments, the RNAi agent has a modified sense strand of SEQ ID NO: 456 conjugated to Formula V at the 3′ end. In some embodiments, the RNAi agent has a modified antisense strand of SEQ ID NO: 264. In some embodiments, the RNAi agent has a modified sense strand of SEQ ID NO: 456 conjugated to Formula V at the 3′ end and a modified antisense strand of SEQ ID NO: 264.

[1281] In some embodiments, the RNAi agent has a modified sense strand of SEQ ID NO: 457 conjugated to Formula V at the 3′ end. In some embodiments, the RNAi agent has a modified antisense strand of SEQ ID NO: 265. In some embodiments, the RNAi agent has a modified sense strand of SEQ ID NO: 457 conjugated to Formula V at the 3′ end and a modified antisense strand of SEQ ID NO: 265.

[1282] In some embodiments, the RNAi agent has a modified sense strand of SEQ ID NO: 458 conjugated to Formula V at the 3′ end. In some embodiments, the RNAi agent has a modified antisense strand of SEQ ID NO: 266. In some embodiments, the RNAi agent has a modified sense strand of SEQ ID NO: 458 conjugated to Formula V at the 3′ end and a modified antisense strand of SEQ ID NO: 266.

[1283] In some embodiments, the RNAi agent has a modified sense strand of SEQ ID NO: 459 conjugated to Formula V at the 3′ end. In some embodiments, the RNAi agent has a modified antisense strand of SEQ ID NO: 267. In some embodiments, the RNAi agent has a modified sense strand of SEQ ID NO: 459 conjugated to Formula V at the 3′ end and a modified antisense strand of SEQ ID NO: 267.

[1284] In some embodiments, the RNAi agent has a modified sense strand of SEQ ID NO: 460 conjugated to Formula V at the 3′ end. In some embodiments, the RNAi agent has a modified antisense strand of SEQ ID NO: 268. In some embodiments, the RNAi agent has a modified sense strand of SEQ ID NO: 460 conjugated to Formula V at the 3′ end and a modified antisense strand of SEQ ID NO: 268.

[1285] In some embodiments, the RNAi agent has a modified sense strand of SEQ ID NO: 461 conjugated to Formula V at the 3′ end. In some embodiments, the RNAi agent has a modified antisense strand of SEQ ID NO: 269. In some embodiments, the RNAi agent has a modified sense strand of SEQ ID NO: 461 conjugated to Formula V at the 3′ end and a modified antisense strand of SEQ ID NO: 269.

[1286] In some embodiments, the RNAi agent has a modified sense strand of SEQ ID NO: 462 conjugated to Formula V at the 3′ end. In some embodiments, the RNAi agent has a modified antisense strand of SEQ ID NO: 270. In some embodiments, the RNAi agent has a modified sense strand of SEQ ID NO: 462 conjugated to Formula V at the 3′ end and a modified antisense strand of SEQ ID NO: 270.

[1287] In some embodiments, the RNAi agent has a modified sense strand of SEQ ID NO: 463 conjugated to Formula V at the 3′ end. In some embodiments, the RNAi agent has a modified antisense strand of SEQ ID NO: 271. In some embodiments, the RNAi agent has a modified sense strand of SEQ ID NO: 463 conjugated to Formula V at the 3′ end and a modified antisense strand of SEQ ID NO: 271.

[1288] In some embodiments, the RNAi agent has a modified sense strand of SEQ ID NO: 464 conjugated to Formula V at the 3′ end. In some embodiments, the RNAi agent has a modified antisense strand of SEQ ID NO: 272. In some embodiments, the RNAi agent has a modified sense strand of SEQ ID NO: 464 conjugated to Formula V at the 3′ end and a modified antisense strand of SEQ ID NO: 272.

[1289] In some embodiments, the RNAi agent has a modified sense strand of SEQ ID NO: 465 conjugated to Formula V at the 3′ end. In some embodiments, the RNAi agent has a modified antisense strand of SEQ ID NO: 273. In some embodiments, the RNAi agent has a modified sense strand of SEQ ID NO: 465 conjugated to Formula V at the 3′ end and a modified antisense strand of SEQ ID NO: 273.

[1290] In some embodiments, the RNAi agent has a modified sense strand of SEQ ID NO: 466 conjugated to Formula V at the 3′ end. In some embodiments, the RNAi agent has a modified antisense strand of SEQ ID NO: 274. In some embodiments, the RNAi agent has a modified sense strand of SEQ ID NO: 466 conjugated to Formula V at the 3′ end and a modified antisense strand of SEQ ID NO: 274.

[1291] In some embodiments, the RNAi agent has a modified sense strand of SEQ ID NO: 467 conjugated to Formula V at the 3′ end. In some embodiments, the RNAi agent has a modified antisense strand of SEQ ID NO: 275. In some embodiments, the RNAi agent has a modified sense strand of SEQ ID NO: 467 conjugated to Formula V at the 3′ end and a modified antisense strand of SEQ ID NO: 275.

[1292] In some embodiments, the RNAi agent has a modified sense strand of SEQ ID NO: 468 conjugated to Formula V at the 3′ end. In some embodiments, the RNAi agent has a modified antisense strand of SEQ ID NO: 276. In some embodiments, the RNAi agent has a modified sense strand of SEQ ID NO: 468 conjugated to Formula V at the 3′ end and a modified antisense strand of SEQ ID NO: 276.

[1293] In some embodiments, the RNAi agent has a modified sense strand of SEQ ID NO: 469 conjugated to Formula V at the 3′ end. In some embodiments, the RNAi agent has a modified antisense strand of SEQ ID NO: 277. In some embodiments, the RNAi agent has a modified sense strand of SEQ ID NO: 469 conjugated to Formula V at the 3′ end and a modified antisense strand of SEQ ID NO: 277.

[1294] In some embodiments, the RNAi agent has a modified sense strand of SEQ ID NO: 470 conjugated to Formula V at the 3′ end. In some embodiments, the RNAi agent has a modified antisense strand of SEQ ID NO: 278. In some embodiments, the RNAi agent has a modified sense strand of SEQ ID NO: 470 conjugated to Formula V at the 3′ end and a modified antisense strand of SEQ ID NO: 278.

[1295] In some embodiments, the RNAi agent has a modified sense strand of SEQ ID NO: 471 conjugated to Formula V at the 3′ end. In some embodiments, the RNAi agent has a modified antisense strand of SEQ ID NO: 279. In some embodiments, the RNAi agent has a modified sense strand of SEQ ID NO: 471 conjugated to Formula V at the 3′ end and a modified antisense strand of SEQ ID NO: 279.

[1296] In some embodiments, the RNAi agent has a modified sense strand of SEQ ID NO: 472 conjugated to Formula V at the 3′ end. In some embodiments, the RNAi agent has a modified antisense strand of SEQ ID NO: 280. In some embodiments, the RNAi agent has a modified sense strand of SEQ ID NO: 472 conjugated to Formula V at the 3′ end and a modified antisense strand of SEQ ID NO: 280.

[1297] In some embodiments, the RNAi agent has a modified sense strand of SEQ ID NO: 473 conjugated to Formula V at the 3′ end. In some embodiments, the RNAi agent has a modified antisense strand of SEQ ID NO: 281. In some embodiments, the RNAi agent has a modified sense strand of SEQ ID NO: 473 conjugated to Formula V at the 3′ end and a modified antisense strand of SEQ ID NO: 281.

[1298] In some embodiments, the RNAi agent has a modified sense strand of SEQ ID NO: 474 conjugated to Formula V at the 3′ end. In some embodiments, the RNAi agent has a modified antisense strand of SEQ ID NO: 282. In some embodiments, the RNAi agent has a modified sense strand of SEQ ID NO: 474 conjugated to Formula V at the 3′ end and a modified antisense strand of SEQ ID NO: 282.

[1299] In some embodiments, the RNAi agent has a modified sense strand of SEQ ID NO: 475 conjugated to Formula V at the 3′ end. In some embodiments, the RNAi agent has a modified antisense strand of SEQ ID NO: 283. In some embodiments, the RNAi agent has a modified sense strand of SEQ ID NO: 475 conjugated to Formula V at the 3′ end and a modified antisense strand of SEQ ID NO: 283.

[1300] In some embodiments, the RNAi agent has a modified sense strand of SEQ ID NO: 476 conjugated to Formula V at the 3′ end. In some embodiments, the RNAi agent has a modified antisense strand of SEQ ID NO: 284. In some embodiments, the RNAi agent has a modified sense strand of SEQ ID NO: 476 conjugated to Formula V at the 3′ end and a modified antisense strand of SEQ ID NO: 284.

[1301] In some embodiments, the RNAi agent has a modified sense strand of SEQ ID NO: 477 conjugated to Formula V at the 3′ end. In some embodiments, the RNAi agent has a modified antisense strand of SEQ ID NO: 285. In some embodiments, the RNAi agent has a modified sense strand of SEQ ID NO: 477 conjugated to Formula V at the 3′ end and a modified antisense strand of SEQ ID NO: 285.

[1302] In some embodiments, the RNAi agent has a modified sense strand of SEQ ID NO: 478 conjugated to Formula V at the 3′ end. In some embodiments, the RNAi agent has a modified antisense strand of SEQ ID NO: 286. In some embodiments, the RNAi agent has a modified sense strand of SEQ ID NO: 478 conjugated to Formula V at the 3′ end and a modified antisense strand of SEQ ID NO: 286.

[1303] In some embodiments, the RNAi agent has a modified sense strand of SEQ ID NO: 479 conjugated to Formula V at the 3′ end. In some embodiments, the RNAi agent has a modified antisense strand of SEQ ID NO: 287. In some embodiments, the RNAi agent has a modified sense strand of SEQ ID NO: 479 conjugated to Formula V at the 3′ end and a modified antisense strand of SEQ ID NO: 287.

[1304] In some embodiments, the RNAi agent has a modified sense strand of SEQ ID NO: 480 conjugated to Formula V at the 3′ end. In some embodiments, the RNAi agent has a modified antisense strand of SEQ ID NO: 288. In some embodiments, the RNAi agent has a modified sense strand of SEQ ID NO: 480 conjugated to Formula V at the 3′ end and a modified antisense strand of SEQ ID NO: 288.

[1305] In some embodiments, the modified sense strand of the RNAi agent is conjugated to the targeting ligand and linking group of Formula VI.

[1306] In some embodiments, the RNAi agent has a modified sense strand of SEQ ID NO: 385 conjugated to Formula VI at the 3′ end. In some embodiments, the RNAi agent has a modified antisense strand of SEQ ID NO: 193. In some embodiments, the RNAi agent has a modified sense strand of SEQ ID NO: 385 conjugated to Formula VI at the 3′ end and a modified antisense strand of SEQ ID NO: 193.

[1307] In some embodiments, the RNAi agent has a modified sense strand of SEQ ID NO: 386 conjugated to Formula VI at the 3′ end. In some embodiments, the RNAi agent has a modified antisense strand of SEQ ID NO: 194. In some embodiments, the RNAi agent has a modified sense strand of SEQ ID NO: 386 conjugated to Formula VI at the 3′ end and a modified antisense strand of SEQ ID NO: 194.

[1308] In some embodiments, the RNAi agent has a modified sense strand of SEQ ID NO: 387 conjugated to Formula VI at the 3′ end. In some embodiments, the RNAi agent has a modified antisense strand of SEQ ID NO: 195. In some embodiments, the RNAi agent has a modified sense strand of SEQ ID NO: 387 conjugated to Formula VI at the 3′ end and a modified antisense strand of SEQ ID NO: 195.

[1309] In some embodiments, the RNAi agent has a modified sense strand of SEQ ID NO: 388 conjugated to Formula VI at the 3′ end. In some embodiments, the RNAi agent has a modified antisense strand of SEQ ID NO: 196. In some embodiments, the RNAi agent has a modified sense strand of SEQ ID NO: 388 conjugated to Formula VI at the 3′ end and a modified antisense strand of SEQ ID NO: 196.

[1310] In some embodiments, the RNAi agent has a modified sense strand of SEQ ID NO: 389 conjugated to Formula VI at the 3′ end. In some embodiments, the RNAi agent has a modified antisense strand of SEQ ID NO: 197. In some embodiments, the RNAi agent has a modified sense strand of SEQ ID NO: 389 conjugated to Formula VI at the 3′ end and a modified antisense strand of SEQ ID NO: 197.

[1311] In some embodiments, the RNAi agent has a modified sense strand of SEQ ID NO: 390 conjugated to Formula VI at the 3′ end. In some embodiments, the RNAi agent has a modified antisense strand of SEQ ID NO: 198. In some embodiments, the RNAi agent has a modified sense strand of SEQ ID NO: 390 conjugated to Formula VI at the 3′ end and a modified antisense strand of SEQ ID NO: 198.

[1312] In some embodiments, the RNAi agent has a modified sense strand of SEQ ID NO: 391 conjugated to Formula VI at the 3′ end. In some embodiments, the RNAi agent has a modified antisense strand of SEQ ID NO: 199. In some embodiments, the RNAi agent has a modified sense strand of SEQ ID NO: 391 conjugated to Formula VI at the 3′ end and a modified antisense strand of SEQ ID NO: 199.

[1313] In some embodiments, the RNAi agent has a modified sense strand of SEQ ID NO: 392 conjugated to Formula VI at the 3′ end. In some embodiments, the RNAi agent has a modified antisense strand of SEQ ID NO: 200. In some embodiments, the RNAi agent has a modified sense strand of SEQ ID NO: 392 conjugated to Formula VI at the 3′ end and a modified antisense strand of SEQ ID NO: 200.

[1314] In some embodiments, the RNAi agent has a modified sense strand of SEQ ID NO: 393 conjugated to Formula VI at the 3′ end. In some embodiments, the RNAi agent has a modified antisense strand of SEQ ID NO: 201. In some embodiments, the RNAi agent has a modified sense strand of SEQ ID NO: 393 conjugated to Formula VI at the 3′ end and a modified antisense strand of SEQ ID NO: 201.

[1315] In some embodiments, the RNAi agent has a modified sense strand of SEQ ID NO: 394 conjugated to Formula VI at the 3′ end. In some embodiments, the RNAi agent has a modified antisense strand of SEQ ID NO: 202. In some embodiments, the RNAi agent has a modified sense strand of SEQ ID NO: 394 conjugated to Formula VI at the 3′ end and a modified antisense strand of SEQ ID NO: 202.

[1316] In some embodiments, the RNAi agent has a modified sense strand of SEQ ID NO: 395 conjugated to Formula VI at the 3′ end. In some embodiments, the RNAi agent has a modified antisense strand of SEQ ID NO: 203. In some embodiments, the RNAi agent has a modified sense strand of SEQ ID NO: 395 conjugated to Formula VI at the 3′ end and a modified antisense strand of SEQ ID NO: 203.

[1317] In some embodiments, the RNAi agent has a modified sense strand of SEQ ID NO: 396 conjugated to Formula VI at the 3′ end. In some embodiments, the RNAi agent has a modified antisense strand of SEQ ID NO: 204. In some embodiments, the RNAi agent has a modified sense strand of SEQ ID NO: 306 conjugated to Formula VI at the 3′ end and a modified antisense strand of SEQ ID NO: 204.

[1318] In some embodiments, the RNAi agent has a modified sense strand of SEQ ID NO: 397 conjugated to Formula VI at the 3′ end. In some embodiments, the RNAi agent has a modified antisense strand of SEQ ID NO: 205. In some embodiments, the RNAi agent has a modified sense strand of SEQ ID NO: 397 conjugated to Formula VI at the 3′ end and a modified antisense strand of SEQ ID NO: 205.

[1319] In some embodiments, the RNAi agent has a modified sense strand of SEQ ID NO: 398 conjugated to Formula VI at the 3′ end. In some embodiments, the RNAi agent has a modified antisense strand of SEQ ID NO: 206. In some embodiments, the RNAi agent has a modified sense strand of SEQ ID NO: 398 conjugated to Formula VI at the 3′ end and a modified antisense strand of SEQ ID NO: 206.

[1320] In some embodiments, the RNAi agent has a modified sense strand of SEQ ID NO: 399 conjugated to Formula VI at the 3′ end. In some embodiments, the RNAi agent has a modified antisense strand of SEQ ID NO: 207. In some embodiments, the RNAi agent has a modified sense strand of SEQ ID NO: 399 conjugated to Formula VI at the 3′ end and a modified antisense strand of SEQ ID NO: 207.

[1321] In some embodiments, the RNAi agent has a modified sense strand of SEQ ID NO: 400 conjugated to Formula VI at the 3′ end. In some embodiments, the RNAi agent has a modified antisense strand of SEQ ID NO: 208. In some embodiments, the RNAi agent has a modified sense strand of SEQ ID NO: 400 conjugated to Formula VI at the 3′ end and a modified antisense strand of SEQ ID NO: 208.

[1322] In some embodiments, the RNAi agent has a modified sense strand of SEQ ID NO: 401 conjugated to Formula VI at the 3′ end. In some embodiments, the RNAi agent has a modified antisense strand of SEQ ID NO: 209. In some embodiments, the RNAi agent has a modified sense strand of SEQ ID NO: 401 conjugated to Formula VI at the 3′ end and a modified antisense strand of SEQ ID NO: 209.

[1323] In some embodiments, the RNAi agent has a modified sense strand of SEQ ID NO: 402 conjugated to Formula VI at the 3′ end. In some embodiments, the RNAi agent has a modified antisense strand of SEQ ID NO: 210. In some embodiments, the RNAi agent has a modified sense strand of SEQ ID NO: 402 conjugated to Formula VI at the 3′ end and a modified antisense strand of SEQ ID NO: 210.

[1324] In some embodiments, the RNAi agent has a modified sense strand of SEQ ID NO: 403 conjugated to Formula VI at the 3′ end. In some embodiments, the RNAi agent has a modified antisense strand of SEQ ID NO: 211. In some embodiments, the RNAi agent has a modified sense strand of SEQ ID NO: 403 conjugated to Formula VI at the 3′ end and a modified antisense strand of SEQ ID NO: 211.

[1325] In some embodiments, the RNAi agent has a modified sense strand of SEQ ID NO: 404 conjugated to Formula VI at the 3′ end. In some embodiments, the RNAi agent has a modified antisense strand of SEQ ID NO: 212. In some embodiments, the RNAi agent has a modified sense strand of SEQ ID NO: 404 conjugated to Formula VI at the 3′ end and a modified antisense strand of SEQ ID NO: 212.

[1326] In some embodiments, the RNAi agent has a modified sense strand of SEQ ID NO: 405 conjugated to Formula VI at the 3′ end. In some embodiments, the RNAi agent has a modified antisense strand of SEQ ID NO: 213. In some embodiments, the RNAi agent has a modified sense strand of SEQ ID NO: 405 conjugated to Formula VI at the 3′ end and a modified antisense strand of SEQ ID NO: 213.

[1327] In some embodiments, the RNAi agent has a modified sense strand of SEQ ID NO: 406 conjugated to Formula VI at the 3′ end. In some embodiments, the RNAi agent has a modified antisense strand of SEQ ID NO: 214. In some embodiments, the RNAi agent has a modified sense strand of SEQ ID NO: 406 conjugated to Formula VI at the 3′ end and a modified antisense strand of SEQ ID NO: 214.

[1328] In some embodiments, the RNAi agent has a modified sense strand of SEQ ID NO: 407 conjugated to Formula VI at the 3′ end. In some embodiments, the RNAi agent has a modified antisense strand of SEQ ID NO: 215. In some embodiments, the RNAi agent has a modified sense strand of SEQ ID NO: 407 conjugated to Formula VI at the 3′ end and a modified antisense strand of SEQ ID NO: 215.

[1329] In some embodiments, the RNAi agent has a modified sense strand of SEQ ID NO: 408 conjugated to Formula VI at the 3′ end. In some embodiments, the RNAi agent has a modified antisense strand of SEQ ID NO: 216. In some embodiments, the RNAi agent has a modified sense strand of SEQ ID NO: 408 conjugated to Formula VI at the 3′ end and a modified antisense strand of SEQ ID NO: 216.

[1330] In some embodiments, the RNAi agent has a modified sense strand of SEQ ID NO: 409 conjugated to Formula VI at the 3′ end. In some embodiments, the RNAi agent has a modified antisense strand of SEQ ID NO: 217. In some embodiments, the RNAi agent has a modified sense strand of SEQ ID NO: 409 conjugated to Formula VI at the 3′ end and a modified antisense strand of SEQ ID NO: 217.

[1331] In some embodiments, the RNAi agent has a modified sense strand of SEQ ID NO: 410 conjugated to Formula VI at the 3′ end. In some embodiments, the RNAi agent has a modified antisense strand of SEQ ID NO: 218. In some embodiments, the RNAi agent has a modified sense strand of SEQ ID NO: 410 conjugated to Formula VI at the 3′ end and a modified antisense strand of SEQ ID NO: 218.

[1332] In some embodiments, the RNAi agent has a modified sense strand of SEQ ID NO: 411 conjugated to Formula VI at the 3′ end. In some embodiments, the RNAi agent has a modified antisense strand of SEQ ID NO: 219. In some embodiments, the RNAi agent has a modified sense strand of SEQ ID NO: 411 conjugated to Formula VI at the 3′ end and a modified antisense strand of SEQ ID NO: 219.

[1333] In some embodiments, the RNAi agent has a modified sense strand of SEQ ID NO: 412 conjugated to Formula VI at the 3′ end. In some embodiments, the RNAi agent has a modified antisense strand of SEQ ID NO: 220. In some embodiments, the RNAi agent has a modified sense strand of SEQ ID NO: 412 conjugated to Formula VII at the 3′ end and a modified antisense strand of SEQ ID NO: 220.

[1334] In some embodiments, the RNAi agent has a modified sense strand of SEQ ID NO: 413 conjugated to Formula VI at the 3′ end. In some embodiments, the RNAi agent has a modified antisense strand of SEQ ID NO: 221. In some embodiments, the RNAi agent has a modified sense strand of SEQ ID NO: 413 conjugated to Formula VI at the 3′ end and a modified antisense strand of SEQ ID NO: 221.

[1335] In some embodiments, the RNAi agent has a modified sense strand of SEQ ID NO: 414 conjugated to Formula VI at the 3′ end. In some embodiments, the RNAi agent has a modified antisense strand of SEQ ID NO: 222. In some embodiments, the RNAi agent has a modified sense strand of SEQ ID NO: 414 conjugated to Formula VI at the 3′ end and a modified antisense strand of SEQ ID NO: 222.

[1336] In some embodiments, the RNAi agent has a modified sense strand of SEQ ID NO: 415 conjugated to Formula VI at the 3′ end. In some embodiments, the RNAi agent has a modified antisense strand of SEQ ID NO: 223. In some embodiments, the RNAi agent has a modified sense strand of SEQ ID NO: 415 conjugated to Formula VI at the 3′ end and a modified antisense strand of SEQ ID NO: 223.

[1337] In some embodiments, the RNAi agent has a modified sense strand of SEQ ID NO: 416 conjugated to Formula VI at the 3′ end. In some embodiments, the RNAi agent has a modified antisense strand of SEQ ID NO: 224. In some embodiments, the RNAi agent has a modified sense strand of SEQ ID NO: 416 conjugated to Formula VI at the 3′ end and a modified antisense strand of SEQ ID NO: 224.

[1338] In some embodiments, the RNAi agent has a modified sense strand of SEQ ID NO: 417 conjugated to Formula VI at the 3′ end. In some embodiments, the RNAi agent has a modified antisense strand of SEQ ID NO: 225. In some embodiments, the RNAi agent has a modified sense strand of SEQ ID NO: 417 conjugated to Formula VI at the 3′ end and a modified antisense strand of SEQ ID NO: 225.

[1339] In some embodiments, the RNAi agent has a modified sense strand of SEQ ID NO: 418 conjugated to Formula VI at the 3′ end. In some embodiments, the RNAi agent has a modified antisense strand of SEQ ID NO: 226. In some embodiments, the RNAi agent has a modified sense strand of SEQ ID NO: 418 conjugated to Formula VI at the 3′ end and a modified antisense strand of SEQ ID NO: 226.

[1340] In some embodiments, the RNAi agent has a modified sense strand of SEQ ID NO: 419 conjugated to Formula VI at the 3′ end. In some embodiments, the RNAi agent has a modified antisense strand of SEQ ID NO: 227. In some embodiments, the RNAi agent has a modified sense strand of SEQ ID NO: 419 conjugated to Formula VI at the 3′ end and a modified antisense strand of SEQ ID NO: 227.

[1341] In some embodiments, the RNAi agent has a modified sense strand of SEQ ID NO: 420 conjugated to Formula VI at the 3′ end. In some embodiments, the RNAi agent has a modified antisense strand of SEQ ID NO: 228. In some embodiments, the RNAi agent has a modified sense strand of SEQ ID NO: 420 conjugated to Formula VI at the 3′ end and a modified antisense strand of SEQ ID NO: 228.

[1342] In some embodiments, the RNAi agent has a modified sense strand of SEQ ID NO: 421 conjugated to Formula VI at the 3′ end. In some embodiments, the RNAi agent has a modified antisense strand of SEQ ID NO: 229. In some embodiments, the RNAi agent has a modified sense strand of SEQ ID NO: 421 conjugated to Formula VI at the 3′ end and a modified antisense strand of SEQ ID NO: 229.

[1343] In some embodiments, the RNAi agent has a modified sense strand of SEQ ID NO: 422 conjugated to Formula VI at the 3′ end. In some embodiments, the RNAi agent has a modified antisense strand of SEQ ID NO: 230. In some embodiments, the RNAi agent has a modified sense strand of SEQ ID NO: 422 conjugated to Formula VI at the 3′ end and a modified antisense strand of SEQ ID NO: 230.

[1344] In some embodiments, the RNAi agent has a modified sense strand of SEQ ID NO: 423 conjugated to Formula VI at the 3′ end. In some embodiments, the RNAi agent has a modified antisense strand of SEQ ID NO: 231. In some embodiments, the RNAi agent has a modified sense strand of SEQ ID NO: 423 conjugated to Formula VI at the 3′ end and a modified antisense strand of SEQ ID NO: 231.

[1345] In some embodiments, the RNAi agent has a modified sense strand of SEQ ID NO: 424 conjugated to Formula VI at the 3′ end. In some embodiments, the RNAi agent has a modified antisense strand of SEQ ID NO: 232. In some embodiments, the RNAi agent has a modified sense strand of SEQ ID NO: 424 conjugated to Formula VI at the 3′ end and a modified antisense strand of SEQ ID NO: 232.

[1346] In some embodiments, the RNAi agent has a modified sense strand of SEQ ID NO: 425 conjugated to Formula VI at the 3′ end. In some embodiments, the RNAi agent has a modified antisense strand of SEQ ID NO: 233. In some embodiments, the RNAi agent has a modified sense strand of SEQ ID NO: 425 conjugated to Formula VI at the 3′ end and a modified antisense strand of SEQ ID NO: 233.

[1347] In some embodiments, the RNAi agent has a modified sense strand of SEQ ID NO: 426 conjugated to Formula VI at the 3′ end. In some embodiments, the RNAi agent has a modified antisense strand of SEQ ID NO: 234. In some embodiments, the RNAi agent has a modified sense strand of SEQ ID NO: 426 conjugated to Formula VI at the 3′ end and a modified antisense strand of SEQ ID NO: 234.

[1348] In some embodiments, the RNAi agent has a modified sense strand of SEQ ID NO: 427 conjugated to Formula VI at the 3′ end. In some embodiments, the RNAi agent has a modified antisense strand of SEQ ID NO: 235. In some embodiments, the RNAi agent has a modified sense strand of SEQ ID NO: 427 conjugated to Formula VI at the 3′ end and a modified antisense strand of SEQ ID NO: 235.

[1349] In some embodiments, the RNAi agent has a modified sense strand of SEQ ID NO: 428 conjugated to Formula VI at the 3′ end. In some embodiments, the RNAi agent has a modified antisense strand of SEQ ID NO: 236. In some embodiments, the RNAi agent has a modified sense strand of SEQ ID NO: 428 conjugated to Formula VI at the 3′ end and a modified antisense strand of SEQ ID NO: 236.

[1350] In some embodiments, the RNAi agent has a modified sense strand of SEQ ID NO: 429 conjugated to Formula VI at the 3′ end. In some embodiments, the RNAi agent has a modified antisense strand of SEQ ID NO: 237. In some embodiments, the RNAi agent has a modified sense strand of SEQ ID NO: 429 conjugated to Formula VI at the 3′ end and a modified antisense strand of SEQ ID NO: 237.

[1351] In some embodiments, the RNAi agent has a modified sense strand of SEQ ID NO: 430 conjugated to Formula VI at the 3′ end. In some embodiments, the RNAi agent has a modified antisense strand of SEQ ID NO: 238. In some embodiments, the RNAi agent has a modified sense strand of SEQ ID NO: 430 conjugated to Formula VI at the 3′ end and a modified antisense strand of SEQ ID NO: 238.

[1352] In some embodiments, the RNAi agent has a modified sense strand of SEQ ID NO: 431 conjugated to Formula VI at the 3′ end. In some embodiments, the RNAi agent has a modified antisense strand of SEQ ID NO: 239. In some embodiments, the RNAi agent has a modified sense strand of SEQ ID NO: 431 conjugated to Formula VI at the 3′ end and a modified antisense strand of SEQ ID NO: 239.

[1353] In some embodiments, the RNAi agent has a modified sense strand of SEQ ID NO: 432 conjugated to Formula VI at the 3′ end. In some embodiments, the RNAi agent has a modified antisense strand of SEQ ID NO: 240. In some embodiments, the RNAi agent has a modified sense strand of SEQ ID NO: 432 conjugated to Formula VI at the 3′ end and a modified antisense strand of SEQ ID NO: 240.

[1354] In some embodiments, the RNAi agent has a modified sense strand of SEQ ID NO: 433 conjugated to Formula VI at the 3′ end. In some embodiments, the RNAi agent has a modified antisense strand of SEQ ID NO: 241. In some embodiments, the RNAi agent has a modified sense strand of SEQ ID NO: 433 conjugated to Formula VI at the 3′ end and a modified antisense strand of SEQ ID NO: 241.

[1355] In some embodiments, the RNAi agent has a modified sense strand of SEQ ID NO: 434 conjugated to Formula VI at the 3′ end. In some embodiments, the RNAi agent has a modified antisense strand of SEQ ID NO: 242. In some embodiments, the RNAi agent has a modified sense strand of SEQ ID NO: 434 conjugated to Formula VI at the 3′ end and a modified antisense strand of SEQ ID NO: 242.

[1356] In some embodiments, the RNAi agent has a modified sense strand of SEQ ID NO: 435 conjugated to Formula VI at the 3′ end. In some embodiments, the RNAi agent has a modified antisense strand of SEQ ID NO: 243. In some embodiments, the RNAi agent has a modified sense strand of SEQ ID NO: 435 conjugated to Formula VI at the 3′ end and a modified antisense strand of SEQ ID NO: 243.

[1357] In some embodiments, the RNAi agent has a modified sense strand of SEQ ID NO: 436 conjugated to Formula VI at the 3′ end. In some embodiments, the RNAi agent has a modified antisense strand of SEQ ID NO: 244. In some embodiments, the RNAi agent has a modified sense strand of SEQ ID NO: 436 conjugated to Formula VI at the 3′ end and a modified antisense strand of SEQ ID NO: 244.

[1358] In some embodiments, the RNAi agent has a modified sense strand of SEQ ID NO: 437 conjugated to Formula VI at the 3′ end. In some embodiments, the RNAi agent has a modified antisense strand of SEQ ID NO: 245. In some embodiments, the RNAi agent has a modified sense strand of SEQ ID NO: 437 conjugated to Formula VI at the 3′ end and a modified antisense strand of SEQ ID NO: 245.

[1359] In some embodiments, the RNAi agent has a modified sense strand of SEQ ID NO: 438 conjugated to Formula VI at the 3′ end. In some embodiments, the RNAi agent has a modified antisense strand of SEQ ID NO: 246. In some embodiments, the RNAi agent has a modified sense strand of SEQ ID NO: 438 conjugated to Formula VI at the 3′ end and a modified antisense strand of SEQ ID NO: 246.

[1360] In some embodiments, the RNAi agent has a modified sense strand of SEQ ID NO: 439 conjugated to Formula VI at the 3′ end. In some embodiments, the RNAi agent has a modified antisense strand of SEQ ID NO: 247. In some embodiments, the RNAi agent has a modified sense strand of SEQ ID NO: 439 conjugated to Formula VI at the 3′ end and a modified antisense strand of SEQ ID NO: 247.

[1361] In some embodiments, the RNAi agent has a modified sense strand of SEQ ID NO: 440 conjugated to Formula VI at the 3′ end. In some embodiments, the RNAi agent has a modified antisense strand of SEQ ID NO: 248. In some embodiments, the RNAi agent has a modified sense strand of SEQ ID NO: 440 conjugated to Formula VI at the 3′ end and a modified antisense strand of SEQ ID NO: 248.

[1362] In some embodiments, the RNAi agent has a modified sense strand of SEQ ID NO: 441 conjugated to Formula VI at the 3′ end. In some embodiments, the RNAi agent has a modified antisense strand of SEQ ID NO: 249. In some embodiments, the RNAi agent has a modified sense strand of SEQ ID NO: 441 conjugated to Formula VI at the 3′ end and a modified antisense strand of SEQ ID NO: 249.

[1363] In some embodiments, the RNAi agent has a modified sense strand of SEQ ID NO: 442 conjugated to Formula VI at the 3′ end. In some embodiments, the RNAi agent has a modified antisense strand of SEQ ID NO: 250. In some embodiments, the RNAi agent has a modified sense strand of SEQ ID NO: 442 conjugated to Formula VI at the 3′ end and a modified antisense strand of SEQ ID NO: 250.

[1364] In some embodiments, the RNAi agent has a modified sense strand of SEQ ID NO: 443 conjugated to Formula VI at the 3′ end. In some embodiments, the RNAi agent has a modified antisense strand of SEQ ID NO: 251. In some embodiments, the RNAi agent has a modified sense strand of SEQ ID NO: 443 conjugated to Formula VI at the 3′ end and a modified antisense strand of SEQ ID NO: 251.

[1365] In some embodiments, the RNAi agent has a modified sense strand of SEQ ID NO: 444 conjugated to Formula VI at the 3′ end. In some embodiments, the RNAi agent has a modified antisense strand of SEQ ID NO: 252. In some embodiments, the RNAi agent has a modified sense strand of SEQ ID NO: 444 conjugated to Formula VI at the 3′ end and a modified antisense strand of SEQ ID NO: 252.

[1366] In some embodiments, the RNAi agent has a modified sense strand of SEQ ID NO: 445 conjugated to Formula VI at the 3′ end. In some embodiments, the RNAi agent has a modified antisense strand of SEQ ID NO: 253. In some embodiments, the RNAi agent has a modified sense strand of SEQ ID NO: 445 conjugated to Formula VI at the 3′ end and a modified antisense strand of SEQ ID NO: 253.

[1367] In some embodiments, the RNAi agent has a modified sense strand of SEQ ID NO: 446 conjugated to Formula VI at the 3′ end. In some embodiments, the RNAi agent has a modified antisense strand of SEQ ID NO: 254. In some embodiments, the RNAi agent has a modified sense strand of SEQ ID NO: 446 conjugated to Formula VI at the 3′ end and a modified antisense strand of SEQ ID NO: 254.

[1368] In some embodiments, the RNAi agent has a modified sense strand of SEQ ID NO: 447 conjugated to Formula VI at the 3′ end. In some embodiments, the RNAi agent has a modified antisense strand of SEQ ID NO: 255. In some embodiments, the RNAi agent has a modified sense strand of SEQ ID NO: 447 conjugated to Formula VI at the 3′ end and a modified antisense strand of SEQ ID NO: 255.

[1369] In some embodiments, the RNAi agent has a modified sense strand of SEQ ID NO: 448 conjugated to Formula VI at the 3′ end. In some embodiments, the RNAi agent has a modified antisense strand of SEQ ID NO: 256. In some embodiments, the RNAi agent has a modified sense strand of SEQ ID NO: 448 conjugated to Formula VI at the 3′ end and a modified antisense strand of SEQ ID NO: 256.

[1370] In some embodiments, the RNAi agent has a modified sense strand of SEQ ID NO: 449 conjugated to Formula VI at the 3′ end. In some embodiments, the RNAi agent has a modified antisense strand of SEQ ID NO: 257. In some embodiments, the RNAi agent has a modified sense strand of SEQ ID NO: 449 conjugated to Formula VI at the 3′ end and a modified antisense strand of SEQ ID NO: 257.

[1371] In some embodiments, the RNAi agent has a modified sense strand of SEQ ID NO: 450 conjugated to Formula VI at the 3′ end. In some embodiments, the RNAi agent has a modified antisense strand of SEQ ID NO: 258. In some embodiments, the RNAi agent has a modified sense strand of SEQ ID NO: 450 conjugated to Formula VI at the 3′ end and a modified antisense strand of SEQ ID NO: 258.

[1372] In some embodiments, the RNAi agent has a modified sense strand of SEQ ID NO: 451 conjugated to Formula VI at the 3′ end. In some embodiments, the RNAi agent has a modified antisense strand of SEQ ID NO: 259. In some embodiments, the RNAi agent has a modified sense strand of SEQ ID NO: 451 conjugated to Formula VI at the 3′ end and a modified antisense strand of SEQ ID NO: 259.

[1373] In some embodiments, the RNAi agent has a modified sense strand of SEQ ID NO: 452 conjugated to Formula VI at the 3′ end. In some embodiments, the RNAi agent has a modified antisense strand of SEQ ID NO: 260. In some embodiments, the RNAi agent has a modified sense strand of SEQ ID NO: 452 conjugated to Formula VI at the 3′ end and a modified antisense strand of SEQ ID NO: 260.

[1374] In some embodiments, the RNAi agent has a modified sense strand of SEQ ID NO: 453 conjugated to Formula VI at the 3′ end. In some embodiments, the RNAi agent has a modified antisense strand of SEQ ID NO: 261. In some embodiments, the RNAi agent has a modified sense strand of SEQ ID NO: 453 conjugated to Formula VI at the 3′ end and a modified antisense strand of SEQ ID NO: 261.

[1375] In some embodiments, the RNAi agent has a modified sense strand of SEQ ID NO: 454 conjugated to Formula VI at the 3′ end. In some embodiments, the RNAi agent has a modified antisense strand of SEQ ID NO: 262. In some embodiments, the RNAi agent has a modified sense strand of SEQ ID NO: 454 conjugated to Formula VI at the 3′ end and a modified antisense strand of SEQ ID NO: 262.

[1376] In some embodiments, the RNAi agent has a modified sense strand of SEQ ID NO: 455 conjugated to Formula VI at the 3′ end. In some embodiments, the RNAi agent has a modified antisense strand of SEQ ID NO: 263. In some embodiments, the RNAi agent has a modified sense strand of SEQ ID NO: 455 conjugated to Formula VI at the 3′ end and a modified antisense strand of SEQ ID NO: 263.

[1377] In some embodiments, the RNAi agent has a modified sense strand of SEQ ID NO: 456 conjugated to Formula VI at the 3′ end. In some embodiments, the RNAi agent has a modified antisense strand of SEQ ID NO: 264. In some embodiments, the RNAi agent has a modified sense strand of SEQ ID NO: 456 conjugated to Formula VI at the 3′ end and a modified antisense strand of SEQ ID NO: 264.

[1378] In some embodiments, the RNAi agent has a modified sense strand of SEQ ID NO: 457 conjugated to Formula VI at the 3′ end. In some embodiments, the RNAi agent has a modified antisense strand of SEQ ID NO: 265. In some embodiments, the RNAi agent has a modified sense strand of SEQ ID NO: 457 conjugated to Formula VI at the 3′ end and a modified antisense strand of SEQ ID NO: 265.

[1379] In some embodiments, the RNAi agent has a modified sense strand of SEQ ID NO: 458 conjugated to Formula VI at the 3′ end. In some embodiments, the RNAi agent has a modified antisense strand of SEQ ID NO: 266. In some embodiments, the RNAi agent has a modified sense strand of SEQ ID NO: 458 conjugated to Formula VI at the 3′ end and a modified antisense strand of SEQ ID NO: 266.

[1380] In some embodiments, the RNAi agent has a modified sense strand of SEQ ID NO: 459 conjugated to Formula VI at the 3′ end. In some embodiments, the RNAi agent has a modified antisense strand of SEQ ID NO: 267. In some embodiments, the RNAi agent has a modified sense strand of SEQ ID NO: 459 conjugated to Formula VI at the 3′ end and a modified antisense strand of SEQ ID NO: 267.

[1381] In some embodiments, the RNAi agent has a modified sense strand of SEQ ID NO: 460 conjugated to Formula VI at the 3′ end. In some embodiments, the RNAi agent has a modified antisense strand of SEQ ID NO: 268. In some embodiments, the RNAi agent has a modified sense strand of SEQ ID NO: 460 conjugated to Formula VI at the 3′ end and a modified antisense strand of SEQ ID NO: 268.

[1382] In some embodiments, the RNAi agent has a modified sense strand of SEQ ID NO: 461 conjugated to Formula VI at the 3′ end. In some embodiments, the RNAi agent has a modified antisense strand of SEQ ID NO: 269. In some embodiments, the RNAi agent has a modified sense strand of SEQ ID NO: 461 conjugated to Formula VI at the 3′ end and a modified antisense strand of SEQ ID NO: 269.

[1383] In some embodiments, the RNAi agent has a modified sense strand of SEQ ID NO: 462 conjugated to Formula VI at the 3′ end. In some embodiments, the RNAi agent has a modified antisense strand of SEQ ID NO: 270. In some embodiments, the RNAi agent has a modified sense strand of SEQ ID NO: 462 conjugated to Formula VI at the 3′ end and a modified antisense strand of SEQ ID NO: 270.

[1384] In some embodiments, the RNAi agent has a modified sense strand of SEQ ID NO: 463 conjugated to Formula VI at the 3′ end. In some embodiments, the RNAi agent has a modified antisense strand of SEQ ID NO: 271. In some embodiments, the RNAi agent has a modified sense strand of SEQ ID NO: 463 conjugated to Formula VI at the 3′ end and a modified antisense strand of SEQ ID NO: 271.

[1385] In some embodiments, the RNAi agent has a modified sense strand of SEQ ID NO: 464 conjugated to Formula VI at the 3′ end. In some embodiments, the RNAi agent has a modified antisense strand of SEQ ID NO: 272. In some embodiments, the RNAi agent has a modified sense strand of SEQ ID NO: 464 conjugated to Formula VI at the 3′ end and a modified antisense strand of SEQ ID NO: 272.

[1386] In some embodiments, the RNAi agent has a modified sense strand of SEQ ID NO: 465 conjugated to Formula VI at the 3′ end. In some embodiments, the RNAi agent has a modified antisense strand of SEQ ID NO: 273. In some embodiments, the RNAi agent has a modified sense strand of SEQ ID NO: 465 conjugated to Formula VI at the 3′ end and a modified antisense strand of SEQ ID NO: 273.

[1387] In some embodiments, the RNAi agent has a modified sense strand of SEQ ID NO: 466 conjugated to Formula VI at the 3′ end. In some embodiments, the RNAi agent has a modified antisense strand of SEQ ID NO: 274. In some embodiments, the RNAi agent has a modified sense strand of SEQ ID NO: 466 conjugated to Formula VI at the 3′ end and a modified antisense strand of SEQ ID NO: 274.

[1388] In some embodiments, the RNAi agent has a modified sense strand of SEQ ID NO: 467 conjugated to Formula VI at the 3′ end. In some embodiments, the RNAi agent has a modified antisense strand of SEQ ID NO: 275. In some embodiments, the RNAi agent has a modified sense strand of SEQ ID NO: 467 conjugated to Formula VI at the 3′ end and a modified antisense strand of SEQ ID NO: 275.

[1389] In some embodiments, the RNAi agent has a modified sense strand of SEQ ID NO: 468 conjugated to Formula VI at the 3′ end. In some embodiments, the RNAi agent has a modified antisense strand of SEQ ID NO: 276. In some embodiments, the RNAi agent has a modified sense strand of SEQ ID NO: 468 conjugated to Formula VI at the 3′ end and a modified antisense strand of SEQ ID NO: 276.

[1390] In some embodiments, the RNAi agent has a modified sense strand of SEQ ID NO: 469 conjugated to Formula VI at the 3′ end. In some embodiments, the RNAi agent has a modified antisense strand of SEQ ID NO: 277. In some embodiments, the RNAi agent has a modified sense strand of SEQ ID NO: 469 conjugated to Formula VI at the 3′ end and a modified antisense strand of SEQ ID NO: 277.

[1391] In some embodiments, the RNAi agent has a modified sense strand of SEQ ID NO: 470 conjugated to Formula VI at the 3′ end. In some embodiments, the RNAi agent has a modified antisense strand of SEQ ID NO: 278. In some embodiments, the RNAi agent has a modified sense strand of SEQ ID NO: 470 conjugated to Formula VI at the 3′ end and a modified antisense strand of SEQ ID NO: 278.

[1392] In some embodiments, the RNAi agent has a modified sense strand of SEQ ID NO: 471 conjugated to Formula VI at the 3′ end. In some embodiments, the RNAi agent has a modified antisense strand of SEQ ID NO: 279. In some embodiments, the RNAi agent has a modified sense strand of SEQ ID NO: 471 conjugated to Formula VI at the 3′ end and a modified antisense strand of SEQ ID NO: 279.

[1393] In some embodiments, the RNAi agent has a modified sense strand of SEQ ID NO: 472 conjugated to Formula VI at the 3′ end. In some embodiments, the RNAi agent has a modified antisense strand of SEQ ID NO: 280. In some embodiments, the RNAi agent has a modified sense strand of SEQ ID NO: 472 conjugated to Formula VI at the 3′ end and a modified antisense strand of SEQ ID NO: 280.

[1394] In some embodiments, the RNAi agent has a modified sense strand of SEQ ID NO: 473 conjugated to Formula VI at the 3′ end. In some embodiments, the RNAi agent has a modified antisense strand of SEQ ID NO: 281. In some embodiments, the RNAi agent has a modified sense strand of SEQ ID NO: 473 conjugated to Formula VI at the 3′ end and a modified antisense strand of SEQ ID NO: 281.

[1395] In some embodiments, the RNAi agent has a modified sense strand of SEQ ID NO: 474 conjugated to Formula VI at the 3′ end. In some embodiments, the RNAi agent has a modified antisense strand of SEQ ID NO: 282. In some embodiments, the RNAi agent has a modified sense strand of SEQ ID NO: 474 conjugated to Formula VI at the 3′ end and a modified antisense strand of SEQ ID NO: 282.

[1396] In some embodiments, the RNAi agent has a modified sense strand of SEQ ID NO: 475 conjugated to Formula VI at the 3′ end. In some embodiments, the RNAi agent has a modified antisense strand of SEQ ID NO: 283. In some embodiments, the RNAi agent has a modified sense strand of SEQ ID NO: 475 conjugated to Formula VI at the 3′ end and a modified antisense strand of SEQ ID NO: 283.

[1397] In some embodiments, the RNAi agent has a modified sense strand of SEQ ID NO: 476 conjugated to Formula VI at the 3′ end. In some embodiments, the RNAi agent has a modified antisense strand of SEQ ID NO: 284. In some embodiments, the RNAi agent has a modified sense strand of SEQ ID NO: 476 conjugated to Formula VI at the 3′ end and a modified antisense strand of SEQ ID NO: 284.

[1398] In some embodiments, the RNAi agent has a modified sense strand of SEQ ID NO: 477 conjugated to Formula VI at the 3′ end. In some embodiments, the RNAi agent has a modified antisense strand of SEQ ID NO: 285. In some embodiments, the RNAi agent has a modified sense strand of SEQ ID NO: 477 conjugated to Formula VI at the 3′ end and a modified antisense strand of SEQ ID NO: 285.

[1399] In some embodiments, the RNAi agent has a modified sense strand of SEQ ID NO: 478 conjugated to Formula VI at the 3′ end. In some embodiments, the RNAi agent has a modified antisense strand of SEQ ID NO: 286. In some embodiments, the RNAi agent has a modified sense strand of SEQ ID NO: 478 conjugated to Formula VI at the 3′ end and a modified antisense strand of SEQ ID NO: 286.

[1400] In some embodiments, the RNAi agent has a modified sense strand of SEQ ID NO: 479 conjugated to Formula VI at the 3′ end. In some embodiments, the RNAi agent has a modified antisense strand of SEQ ID NO: 287. In some embodiments, the RNAi agent has a modified sense strand of SEQ ID NO: 479 conjugated to Formula VI at the 3′ end and a modified antisense strand of SEQ ID NO: 287.

[1401] In some embodiments, the RNAi agent has a modified sense strand of SEQ ID NO: 480 conjugated to Formula VI at the 3′ end. In some embodiments, the RNAi agent has a modified antisense strand of SEQ ID NO: 288. In some embodiments, the RNAi agent has a modified sense strand of SEQ ID NO: 480 conjugated to Formula VI at the 3′ end and a modified antisense strand of SEQ ID NO: 288.

### III. PHARMACEUTICAL COMPOSITIONS

[1402] Also provided are compositions including the RNAi agent, including pharmaceutical compositions and formulations. In some embodiments, provided herein is a pharmaceutical composition comprising any one of the RNAi agents provided herein, any one of the modified oligonucleotides provided herein, or any one of the oligomeric duplexes provided herein. The pharmaceutical compositions and formulations generally include one or more optional pharmaceutically acceptable carrier(s) or excipient(s). In some embodiments, provided herein is a pharmaceutical composition comprising any one of the RNAi agents provided herein, any one of the modified oligonucleotides provided herein, or any one of the oligomeric duplexes provided herein, and a pharmaceutically acceptable carrier. In some embodiments, the composition includes at least one additional therapeutic agent.

[1403] The term “pharmaceutical formulation” refers to a preparation which is in such form as to permit the biological activity of an active ingredient contained therein to be effective, and which contains no additional components which are unacceptably toxic to a subject to which the formulation would be administered.

[1404] A “pharmaceutically acceptable carrier” refers to an ingredient in a pharmaceutical formulation, other than an active ingredient, which is nontoxic to a subject. A pharmaceutically acceptable carrier includes, but is not limited to, a buffer, excipient, stabilizer, or preservative.

[1405] In some aspects, the choice of carrier is determined in part by the method of administration. Accordingly, there are a variety of suitable formulations. For example, the pharmaceutical composition can contain preservatives. Suitable preservatives may include, for example, methylparaben, propylparaben, sodium benzoate, and benzalkonium chloride. In some aspects, a mixture of two or more preservatives is used. The preservative or mixtures thereof are typically present in an amount of about 0.0001% to about 2% by weight of the total composition. Carriers are described, e.g., by Remington's Pharmaceutical Sciences 16th edition, Osol, A. Ed. (1980). Pharmaceutically acceptable carriers are generally nontoxic to recipients at the dosages and concentrations employed, and include, but are not limited to: buffers such as phosphate, citrate, and other organic acids; antioxidants including ascorbic acid and methionine; preservatives (such as octadecyldimethylbenzyl ammonium chloride; hexamethonium chloride; benzalkonium chloride; benzethonium chloride; phenol, butyl or benzyl alcohol; alkyl parabens such as methyl or propyl paraben; catechol; resorcinol; cyclohexanol; 3-pentanol; and m-cresol); low molecular weight (less than about 10 residues) polypeptides; proteins, such as serum albumin, gelatin, or immunoglobulins; hydrophilic polymers such as polyvinylpyrrolidone; amino acids such as glycine, glutamine, asparagine, histidine, arginine, or lysine; monosaccharides, disaccharides, and other carbohydrates including glucose, mannose, or dextrins; chelating agents such as EDTA; sugars such as sucrose, mannitol, trehalose or sorbitol; salt-forming counter-ions such as sodium; metal complexes (e.g. Zn-protein complexes); and/or non-ionic surfactants such as polyethylene glycol (PEG).

[1406] Buffering agents in some aspects are included in the compositions. Suitable buffering agents include, for example, citric acid, sodium citrate, phosphoric acid, potassium phosphate, and various other acids and salts. In some aspects, a mixture of two or more buffering agents is used. The buffering agent or mixtures thereof are typically present in an amount of about 0.001% to about 4% by weight of the total composition. Methods for preparing administrable pharmaceutical compositions are known. Exemplary methods are described in more detail in, for example, Remington: The Science and Practice of Pharmacy, Lippincott Williams & Wilkins; 21st ed. (May 1, 2005).

[1407] The formulation or composition may also contain more than one active ingredient useful for the particular indication, disease, or condition being treated with the RNAI agent, preferably those with activities complementary to the binding molecule or cell, where the respective activities do not adversely affect one another. Such active ingredients are suitably present in combination in amounts that are effective for the purpose intended. Thus, in some embodiments, the pharmaceutical composition further includes other pharmaceutically active agents or drugs.

[1408] In some embodiments, a delivery vehicle may be used to deliver an RNAi agent to a cell or tissue. A delivery vehicle is a compound that improves delivery of the RNAi agent to a cell or tissue. A delivery vehicle can include, or consist of, but is not limited to: a polymer, such as an amphipathic polymer, a membrane active polymer, a peptide, a melittin peptide, a melittin-like peptide (MLP), a lipid, a reversibly modified polymer or peptide, or a reversibly modified membrane active polyamine.

[1409] In some embodiments, the RNAi agents, modified oligonucleotides, and oligomeric duplexes can be combined with lipids, nanoparticles, polymers, liposomes, micelles, DPCs or other delivery systems available in the art. The RNAi agents can also be chemically conjugated to targeting groups, lipids (including, but not limited to cholesterol and cholesteryl derivatives), nanoparticles, polymers, liposomes, micelles, DPCs (see, for example WO 2000/053722, WO 2008/0022309, WO 2011/104169, and WO 2012/083185, WO 2013/032829, WO 2013/158141, each of which is incorporated herein by reference), or other delivery systems available in the art. Additional lipid particle formulations are described in U.S. Pat. No. 10,683,501, which is incorporated herein by reference.

[1410] Active ingredients may be entrapped in microcapsules, in colloidal drug delivery systems (for example, liposomes, albumin microspheres, microemulsions, nano-particles and nanocapsules) or in macroemulsions. In certain embodiments, the pharmaceutical composition is formulated as an inclusion complex, such as cyclodextrin inclusion complex, or as a liposome. Liposomes can serve to target the host cells (e.g., T-cells or NK cells) to a particular tissue. M any methods are available for preparing liposomes, such as those described in, for example, Szoka et al., Ann. Rev. Biophys. Bioeng., 9: 467 (1980), and U.S. Pat. Nos. 4,235,871, 4,501,728, 4,837,028, and 5,019,369.

[1411] In some embodiments, the RNAi agents, modified oligonucleotides, and oligomeric duplexes may be fully encapsulated in a lipid formulation, e.g., a LNP, or other nucleic acid-lipid particle. As used herein, the term “LNP” refers to a stable nucleic acid-lipid particle. LNPs typically contain a cationic lipid, a non-cationic lipid, and a lipid that prevents aggregation of the particle (e.g., a PEG-lipid conjugate). LNPs are extremely useful for systemic applications, as they exhibit extended circulation lifetimes following intravenous (i.v.) injection and accumulate at distal sites (e.g., sites physically separated from the administration site). LNPs include “pSPLP,” which include an encapsulated condensing agent-nucleic acid complex as set forth in PCT Publication No. WO 00/03683. The particles of the present invention typically have a mean diameter of about 50 nm to about 150 nm, more typically about 60 nm to about 130 nm, more typically about 70 nm to about 110 nm, most typically about 70 nm to about 90 nm, and are substantially nontoxic. In addition, the nucleic acids when present in the nucleic acid-lipid particles of the present invention are resistant in aqueous solution to degradation with a nuclease. Nucleic acid-lipid particles and their method of preparation are disclosed in, e.g., U.S. Pat. Nos. 5,976,567; 5, 981, 501; 6,534,484; 6,586,410; 6,815,432; U.S. Publication No. 2010/0324120 and PCT Publication No. WO 96/4096.

[1412] In some embodiments, the lipid to drug ratio (mass/mass ratio) (e.g., lipid to dsRNA ratio) will be in the range of from about 1:1 to about 50:1, from about 1:1 to about 25:1, from about 3:1 to about 15:1, from about 4:1 to about 10:1, from about 5:1 to about 9:1, or about 6:1 to about 9:1. Ranges intermediate to the above recited ranges are also contemplated to be part of the invention.

[1413] The cationic lipid can be, for example, N,N-dioleyl-N,N-dimethylammonium chloride (DODAC), N,N-distearyl-N,N-dimethylammonium bromide (DDAB), N—(I-(2,3-dioleoyloxy)propyl)-N, N,N-trimethylammonium chloride (DOTAP), N—(I-(2,3-dioleyloxy)propyl)-N, N,N-trimethylammonium chloride (DOTMA), N,N-dimethyl-2,3-dioleyloxy)propylamine (DODMA), 1,2-DiLinoleyloxy-N,N-dimethylaminopropane (DLinDMA), 1,2-Dilinolenyloxy-N,N-dimethylaminopropane (DLenDMA), 1,2-Dilinoleylcarbamoyloxy-3-dimethylaminopropane (DLin-C-DAP), 1,2-Dilinoleyoxy-3-(dimethylamino)acetoxypropane (DLin-DAC), 1,2-Dilinoleyoxy-3-morpholinopropane (DLin-MA), 1,2-Dilinoleoyl-3-dimethylaminopropane (DLinDAP), 1,2-Dilinoleylthio-3-dimethylaminopropane (DLin-S-DMA), 1-Linoleoyl-2-linoleyloxy-3-dimethylaminopropane (DLin-2-DMAP), 1,2-Dilinoleyloxy-3-trimethylaminopropane chloride salt (DLin-TMA.CI), 1,2-Dilinoleoyl-3-trimethylaminopropanechloride salt (DLin-TAP.CI), 1,2-Dilinoleyloxy-3-(N-methylpiperazino)propane(DLin-MPZ), or 3-(N,N-Dilinoleylamino)-1,2-propanediol (DLinAP), 3-(N,N-Dioleylamino)-1,2-propanedio (DOAP), 1,2-Dilinoleyloxo-3-(2-N,N-dimethylamino)ethoxypropane(DLin-EG-DMA), 1,2-Dilinolenyloxy-N,N-dimethylaminopropane(DLinDMA), 2,2-Dilinoleyl-4-dimethylaminomethyl-[1,3]-dioxolane (DLin-K-DMA) or analogs thereof, (3aR,5s,6aS)—N,N-dimethyl-2,2-di((9Z,12Z)-octadeca-9,12-dienyl)tetrahydro-3aH-cyclopenta[d][1,3]dioxol-5-amine (ALN 100), (6Z,9Z,28Z,31Z)-heptatriaconta-6,9,28,31-tetraen-19-yl 4-(dimethylamino)butanoate (MC3), 1,1′-(2-(4-(2-((2-(bis(2-hydroxydodecyl)amino)ethyl)(2-hydroxydodecyl)amino)ethyl)piperazin-1-yl)ethylazanediyl)didodecan-2-ol (Tech G1), or a mixture thereof. The cationic lipid can comprise from about 20 mol % to about 50 mol % or about 40 mol % of the total lipid present in the particle.

[1414] In some embodiments, the compound 2,2-Dilinoleyl-4-dimethylaminoethyl-[1,3]-dioxolane can be used to prepare lipid-siRNA nanoparticles. Synthesis of 2,2-Dilinoleyl-4-dimethylaminoethyl-[1,3]-dioxolane is described in U.S. provisional patent application No. 61/107,998 filed on Oct. 23, 2008, which is herein incorporated by reference. In some embodiments, the lipid-siRNA particle includes 40% 2,2-Dilinoleyl-4-dimethylaminoethyl-[1,3]-dioxolane: 10% DSPC: 40% Cholesterol: 10% PEG-C-DOM G (mole percent) with a particle size of 63.0±20 nm and a 0.027 siRNA/Lipid Ratio.

[1415] The ionizable/non-cationic lipid can be an anionic lipid or a neutral lipid including, but not limited to, distearoylphosphatidylcholine (DSPC), dioleoylphosphatidylcholine (DOPC), dipalmitoylphosphatidylcholine (DPPC), dioleoylphosphatidylglycerol (DOPG), dipalmitoylphosphatidylglycerol (DPPG), dioleoyl-phosphatidylethanolamine (DOPE), palmitoyloleoylphosphatidylcholine (POPC), palmitoyloleoylphosphatidylethanolamine (POPE), dioleoyl-phosphatidylethanolamine 4-(N-maleimidomethyl)-cyclohexane-1-carboxylate (DOPE-mal), dipalmitoyl phosphatidyl ethanolamine (DPPE), dimyristoylphosphoethanolamine (DMPE), distearoyl-phosphatidyl-ethanolamine (DSPE), 16-O-monomethyl PE, 16-O-dimethyl PE, 18-1-trans PE, 1-stearoyl-2-oleoyl-phosphatidyethanolamine (SOPE), cholesterol, or a mixture thereof. The non-cationic lipid can be from about 5 mol % to about 90 mol %, about 10 mol %, or about 58 mol % if cholesterol is included, of the total lipid present in the particle.

[1416] The conjugated lipid that inhibits aggregation of particles can be, for example, a polyethyleneglycol (PEG)-lipid including, without limitation, a PEG-diacylglycerol (DAG), a PEG-dialkyloxypropyl (DAA), a PEG-phospholipid, a PEG-ceramide (Cer), or a mixture thereof. The PEG-DAA conjugate can be, for example, a PEG-dilauryloxypropyl (Ci₂), a PEG-dimyristyloxypropyl (Ci₄), a PEG-dipalmityloxypropyl (Ci₆), or a PEG-distearyloxypropyl (C]₈). The conjugated lipid that prevents aggregation of particles can be from 0 mol % to about 20 mol % or about 2 mol % of the total lipid present in the particle.

[1417] In some embodiments, the nucleic acid-lipid particle further includes cholesterol at, e.g., about 10 mol % to about 60 mol % or about 48 mol % of the total lipid present in the particle.

[1418] In some embodiments, the lipidoid ND98.4HCl (MW 1487) (see U.S. patent application Ser. No. 12/056,230, filed Mar. 26, 2008, which is incorporated herein by reference), Cholesterol (Sigma-Aldrich), and PEG-CeramideC16 (Avanti Polar Lipids) can be used to prepare lipid-dsRNA nanoparticles (i.e., LNP01 particles). Stock solutions of each in ethanol can be prepared as follows: ND98, 133 mg/ml; Cholesterol, 25 mg/ml, PEG-Ceramide C16, 100 mg/ml. The ND98, Cholesterol, and PEG-Ceramide C16 stock solutions can then be combined in a, e.g., 42:48:10 molar ratio. The combined lipid solution can be mixed with aqueous dsRNA (e.g., in sodium acetate pH 5) such that the final ethanol concentration is about 35-45% and the final sodium acetate concentration is about 100-300 mM. Lipid-dsRNA nanoparticles typically form spontaneously upon mixing. Depending on the desired particle size distribution, the resultant nanoparticle mixture can be extruded through a polycarbonate membrane (e.g., 100 nm cut-off) using, for example, a thermobarrel extruder, such as Lipex Extruder (Northern Lipids, Inc). In some cases, the extrusion step can be omitted. Ethanol removal and simultaneous buffer exchange can be accomplished by, for example, dialysis or tangential flow filtration. Buffer can be exchanged with, for example, phosphate buffered saline (PBS) at about pH 7, e.g., about pH 6.9, about pH 7.0, about pH 7.1, about pH 7.2, about pH 7.3, or about pH 7.4.

[1419] In some embodiments, provided herein is a lipid nanoparticle (such as any of the lipid nanoparticles described herein) comprising any one of the RNAi agents described herein, any one of the modified oligonucleotides described herein, any one of the oligomeric duplexes described herein, or any one of the pharmaceutical compositions described herein.

[1420] The pharmaceutical composition in some aspects can employ time-released, delayed release, and sustained release delivery systems such that the delivery of the composition occurs prior to, and with sufficient time to cause, sensitization of the site to be treated. M any types of release delivery systems are available and known. Such systems can avoid repeated administrations of the composition, thereby increasing convenience to the subject and the physician.

[1421] The pharmaceutical composition in some embodiments contains the RNAi agent in amounts effective to treat or prevent the disease or condition, such as a therapeutically effective or prophylactically effective amount. Therapeutic or prophylactic efficacy in some embodiments is monitored by periodic assessment of treated subjects. For repeated administrations over several days or longer, depending on the condition, the treatment is repeated until a desired suppression of disease symptoms occurs. However, other dosage regimens may be useful and can be determined. The desired dosage can be delivered by a single bolus administration of the composition, by multiple bolus administrations of the composition, or by continuous infusion administration of the composition.

[1422] The pharmaceutical composition may be administered using standard administration techniques, formulations, and/or devices. Provided are formulations and devices, such as syringes and vials, for storage and administration of the compositions. Formulations include those for oral, intravenous, intraperitoneal, subcutaneous, pulmonary, transdermal, intramuscular, intranasal, buccal, sublingual, or suppository administration. In some embodiments, the cell populations are administered parenterally. The term “parenteral,” as used herein, includes intravenous, intramuscular, subcutaneous, rectal, vaginal, intracranial, intrathoracic, and intraperitoneal administration.

[1423] Compositions in some embodiments are provided as sterile liquid preparations, e.g., isotonic aqueous solutions, suspensions, emulsions, dispersions, or viscous compositions, which may in some aspects be buffered to a selected pH. Liquid preparations are normally easier to prepare than gels, other viscous compositions, and solid compositions. Additionally, liquid compositions are somewhat more convenient to administer, especially by injection. Viscous compositions, on the other hand, can be formulated within the appropriate viscosity range to provide longer contact periods with specific tissues. Liquid or viscous compositions can comprise carriers, which can be a solvent or dispersing medium containing, for example, water, saline, phosphate buffered saline, polyol (for example, glycerol, propylene glycol, liquid polyethylene glycol) and suitable mixtures thereof.

[1424] Sterile injectable solutions can be prepared by incorporating the RNAi in a solvent, such as in admixture with a suitable carrier, diluent, or excipient such as sterile water, physiological saline, glucose, dextrose, or the like. The compositions can also be lyophilized. The compositions can contain auxiliary substances such as wetting, dispersing, or emulsifying agents (e.g., methylcellulose), pH buffering agents, gelling or viscosity enhancing additives, preservatives, flavoring agents, colors, and the like, depending upon the route of administration and the preparation desired. Standard texts may in some aspects be consulted to prepare suitable preparations.

[1425] Various additives which enhance the stability and sterility of the compositions, including antimicrobial preservatives, antioxidants, chelating agents, and buffers, can be added. Prevention of the action of microorganisms can be ensured by various antibacterial and antifungal agents, for example, parabens, chlorobutanol, phenol, sorbic acid, and the like. Prolonged absorption of the injectable pharmaceutical form can be brought about by the use of agents delaying absorption, for example, aluminum monostearate and gelatin.

[1426] The formulations to be used for in vivo administration are generally sterile. Sterility may be readily accomplished, e.g., by filtration through sterile filtration membranes.

[1427] In some embodiments, pharmaceutical compositions for delivering an RNAi agent (e.g. a GCK RNAi) to a liver cell in vivo are described. Such pharmaceutical compositions can include, for example, an RNAi agent (e.g. a GCK RNAi) conjugated to a galactose derivative cluster. In some embodiments, the galactose derivative cluster is comprised of a galactose derivative trimer, which can be, for example, an N-acetyl-galactosamine trimer, or galactose derivative tetramer, which can be, for example, an N-acetyl-galactosamine tetramer.

[1428] The present disclosure also provides methods of making a pharmaceutical composition, such as any of the pharmaceutical compositions described herein. In some aspects, provided herein is a method of making a pharmaceutical composition, comprising combining any one of the RNAi agents described herein, any one of the modified oligonucleotides described herein, or any one of the oligomeric duplexes described herein, with a delivery vehicle. In some embodiments, the delivery vehicle is a delivery vehicle selected from the group consisting of a phosphate-buffered saline (PBS), lipid, a nanoparticle, a polymer, a liposome, a micelle, a dynamic polyconjugate (DPC), or an antibody-oligo conjugate.

### IV. USES AND METHODS

[1429] Also provided herein are methods of administering and uses of, such as therapeutic and prophylactic uses of, the RNAi agent (e.g., GCK RNAi) and/or compositions comprising the same. Such methods and uses include therapeutic methods and uses, for example, involving administration of the RNAi (e.g., GCK RNAi) or compositions containing the same, to a subject having a disease, condition, or disorder associated with GCK such as a disease, condition, or disorder associated with GCK expression, and/or in which cells or tissues express, e.g., specifically express, GCK.

[1430] In some embodiments, the RNAi agent and/or composition is administered in an effective amount to effect treatment of the disease or disorder. Provided herein are uses of the RNAi agent in such methods and treatments, and in the preparation of a medicament in order to carry out such therapeutic methods. In some embodiments, the methods are carried out by administering the RNAi agent or compositions comprising the same, to the subject having, having had, or suspected of having the disease or condition. In some embodiments, the methods thereby treat the disease or condition or disorder in the subject. Also provided herein are use of any of the compositions, such as pharmaceutical compositions provided herein, for the treatment of a disease or disorder associated with GCK, such as use in a treatment regimen. Also provided herein are use of any of the compositions, such as pharmaceutical compositions provided herein, for the treatment of Metabolic dysfunction-associated steatotic liver disease (MASLD) and/or metabolic dysfunction-associated steatohepatitis (MASH), such as use in a treatment regimen. Also provided herein are uses of any of the compositions, such as pharmaceutical compositions, for reducing, stopping progression of, or slowing progression of MASLD, MASH, steatosis, fibrosis, and/or cirrhosis.

[1431] The disease, condition, or disorder that is detected and diagnosed by the RNAi agent disclosed herein can be any in which expression of an antigen is associated with and/or involved in the etiology of a disease condition or disorder, e.g. causes, exacerbates or otherwise is involved in such disease, condition, or disorder. Exemplary diseases and conditions can include diseases or conditions associated with malignancy or transformation of cells (e.g., cancer), autoimmune or inflammatory disease, or an infectious disease, e.g., caused by a bacterial, viral or other pathogen.

[1432] In some embodiments, the disease, disorder, or condition is an infectious disease such as infection with a virus or other pathogen, e.g., HIV, HCV, HBV, CMV, HPV, and parasitic disease.

[1433] In some embodiments, the disease, disorder, or condition is a liver disease. In certain embodiments, the liver disease includes, but is not limited to, simple fatty liver (steatosis), metabolic dysfunction-associated steatohepatitis (MASH), fibrosis, and cirrhosis.

[1434] Among the disease, disorder, or condition to be treated is any disease or disorder associated with nonalcoholic fatty liver disease. Among the disease, disorder, or condition to be treated is any disease or disorder associated with GCK or any disease or disorder in which GCK is specifically expressed and/or in which GCK has been targeted for treatment. Glucokinase acts as a sensor of blood glucose levels in the pancreas, and a few other cells of the gut and brain, and as the rate-limiting step in glucose metabolism in the liver. It has been demonstrated that GCK mRNA expression is associated with markers of de novo lipogenesis and liver triglyceride content in humans. It is suggested that increased GCK activity may induce fatty liver and its metabolic and hepatic consequences in humans (Peter, et al., J Clin Endocrinol Metab. 2011 July; 96(7):E1126-30.). In some embodiments, the disease or disorder is non-alcoholic fatty liver. In some embodiments, the disease or disorder is metabolic dysfunction-associated steatohepatitis (MASH). In some embodiments, the disease or disorder is metabolic dysfunction-associated steatotic liver disease (MASLD).

[1435] In some embodiments, provided herein is a method of treating MASLD or MASH in a subject, comprising administering to the subject an effective amount of a liver-targeted modified oligonucleotide, a liver-targeted oligomeric duplex, or a liver-targeted RNAi agent that inhibits expression of GCK. In some embodiments, the liver-targeted modified oligonucleotide, the liver-targeted oligomeric duplex, and the liver-targeted RNAi agent is any one of the modified oligonucleotides, oligomeric duplexes, or RNAi agents described herein.

[1436] In some embodiments, the RNAi (e.g., GCK RNAi) or compositions containing the same are administered to a subject for reducing, stopping progression of, or slowing progression of steatosis, fibrosis, and/or cirrhosis.

[1437] In some embodiments, the RNAi (e.g., GCK RNAi) or compositions containing the same are administered to a subject for inhibiting expression of GCK. In some embodiments, inhibiting expression of GCK comprises reducing the expression of GCK compared to the expression of GCK prior to the administration of the RNAi. In some embodiments, inhibiting expression of GCK comprises eliminating the expression of GCK.

[1438] In some embodiments, provided herein is a method of controlling or reducing liver fat accumulation in a subject, comprising administering to the subject an effective amount of a liver-targeted RNAi agent that inhibits expression of GCK. In some embodiments, inhibiting expression of GCK comprises reducing the expression of GCK compared to the expression of GCK prior to the administration of the RNAi. In some embodiments, inhibiting expression of GCK comprises eliminating the expression of GCK. As used herein “reducing” liver fat accumulation refers to a decrease in liver fat compared to the amount of liver fat present prior to administration of the liver-targeting RNAi agent. In some embodiments, the liver fat accumulation is reduced any of about 1%, 5%, 10%, 15%, 20%, 25%, 30%, 35%, 40%, 45%, 50%, 55%, 60%, 65%, 70%, 75%, 80%, 85%, 90%, 95%, or more, compared to the amount of liver fat present prior to administration of the liver-targeting RNAi agent.

[1439] In some embodiments, the subject is an adult subject. In some embodiments, the subject is ≥18 years of age. In some embodiments, the subject to be treated is human. In some embodiments, the subject, to whom the RNAi agent or compositions are administered, is a primate, such as a human. In some embodiments, the subject, to whom the RNAi agent or compositions are administered, is a non-human primate. In some embodiments, the non-human primate is a monkey (e.g., cynomolgus monkey) or an ape. The subject can be male or female and can be any suitable age, including infant, juvenile, adolescent, adult, and geriatric subjects. In some embodiments, the subject is a non-primate mammal, such as a rodent (e.g., mouse, rat, etc.). In some examples, the patient or subject is a validated animal model for nonalcoholic fatty liver disease and/or for assessing toxic outcomes.

[1440] The RNAi agent can be administered by any suitable means, for example, by injection, e.g., intravenous or subcutaneous injections, intraocular injection, periocular injection, subretinal injection, intravitreal injection, trans-septal injection, subscleral injection, intrachoroidal injection, intracameral injection, subconjunctival injection, subconjunctival injection, sub-Tenon's injection, retrobulbar injection, peribulbar injection, or posterior juxtascleral delivery. In some embodiments, they are administered by parenteral, intrapulmonary, and intranasal, and, if desired for local treatment, intralesional administration. Parenteral infusions include intramuscular, intravenous, intraarterial, intraperitoneal, intracranial, intrathoracic, or subcutaneous administration. Dosing and administration may depend in part on whether the administration is brief or chronic. Various dosing schedules include but are not limited to single or multiple administrations over various time-points, bolus administration, and pulse infusion.

[1441] For the prevention or treatment of disease, the appropriate dosage of the RNAi agent may depend on the type of disease to be treated, the severity and course of the disease, whether the RNAi agent is administered for preventive or therapeutic purposes, the patient's clinical history and response to the RNAi agent, and the discretion of the attending physician. In some embodiments, the RNAi agent and/or composition are suitably administered to the patient at one time or over a series of treatments.

[1442] In some embodiments, the dose and/or frequency of administration is/are determined based on efficacy and/or response. In some embodiments, efficacy is determined by evaluating disease status. Exemplary methods for assessing disease status include: decrease of GCK gene expression, decrease of GCK protein, decrease of liver triglycerides, decrease in lipogenic gene expression (e.g. fatty acid synthase, acetyl-coenzyme A carboxylase-α, and acetyl-coenzyme A carboxylase-β), decrease of liver nodules, or decrease of inflammation in the liver.

[1443] In some embodiments, toxicity and/or side-effects of treatment can be monitored and used to adjust dose and/or frequency of administration of the RNAi agent and/or compositions. For example, adverse events and laboratory abnormalities can be monitored and used to adjust dose and/or frequency of administration. Any of such events may establish dose-limiting toxicities and warrant decrease in dose and/or a termination of treatment.

[1444] In some embodiments, the RNAi agent provided herein (e.g. GCK RNAi) is used to treat or manage a clinical presentation wherein a subject has or is suspected of having metabolic dysfunction-associated steatotic liver disease (MASLD). The subject is administered a therapeutically or effective amount of one or more of the RNAi agents (e.g. GCK RNAi) or RNAi agent-containing compositions described herein. In some embodiments, the method comprises administering a composition comprising an GCK RNAi agent described herein to a subject to be treated.

[1445] In some embodiments, the gene expression level and/or mRNA level of GCK gene in a subject to whom a described GCK RNAi agent is administered is reduced by at least about 5%, 10%, 15%, 20%, 25%, 30%, 35%, 40%, 45%, 50%, 55%, 60%, 65%, 70%, 75%, 80%, 85%, 90%, 95%, 96%, 97%, 98%, 99%, or greater than 99% relative to the subject prior to being administered the GCK RNAi agent or to a subject not receiving the GCK RNAi agent. The gene expression level and/or mRNA level in the subject may be reduced in a cell, group of cells, and/or tissue of the subject. In some embodiments, the expressed protein level of GCK protein in a subject to whom a described GCK RNAi agent has been administered is reduced by at least about 5%, 10%, 15%, 20%, 25%, 30%, 35%, 40%, 45%, 50%, 55%, 60%, 65%, 70%, 75%, 80%, 85%, 90%, 95%, 96%, 97%, 98%, 99%, or greater than 99% relative to the subject prior to being administered the GCK RNAi agent or to a subject not receiving the GCK RNAi agent. The GCK protein level in the subject may be reduced in a cell, group of cells, tissue, blood, and/or other fluid of the subject.

[1446] In some embodiments, the amount or level of liver triglycerides in human liver biopsies of a subject to whom the described GCK RNAi agent has been administered is reduced by at least about 5%, 10%, 15%, 20%, 25%, 30%, 35%, 40%, 45%, 50%, 55%, 60%, 65%, 70%, 75%, 80%, 85%, 90%, 95%, 96%, 97%, 98%, 99%, or greater than 99% relative to the subject prior to being administered the GCK RNAi agent or to a subject not receiving the GCK RNAi agent.

[1447] In some embodiments, the amount or level of lipogenic gene expression (e.g. fatty acid synthase, acetyl-coenzyme A carboxylase-α, and acetyl-coenzyme A carboxylase-β) of a subject to whom the described GCK RNAi agent has been administered is reduced by at least about 5%, 10%, 15%, 20%, 25%, 30%, 35%, 40%, 45%, 50%, 55%, 60%, 65%, 70%, 75%, 80%, 85%, 90%, 95%, 96%, 97%, 98%, 99%, or greater than 99% relative to the subject prior to being administered the GCK RNAi agent or to a subject not receiving the GCK RNAi agent.

[1448] A reduction in the presence of GCK gene expression, GCK mRNA, or GCK protein amounts or levels may be assessed by methods known in the art. Reduction or decrease in GCK mRNA amount or level and/or expressed protein amount or level, and/or liver triglycerides and lipogenic gene expression amount or level are collectively referred to herein as treating or ameliorating metabolic dysfunction-associated steatotic liver disease (MASLD).

[1449] In some embodiments, the amount or size of liver nodules of the liver of the subject to whom the described GCK RNAi agent has been administered is reduced by at least about 5%, 10%, 15%, 20%, 25%, 30%, 35%, 40%, 45%, 50%, 55%, 60%, 65%, 70%, 75%, 80%, 85%, 90%, 95%, 96%, 97%, 98%, 99%, or greater than 99% relative to the subject prior to being administered the GCK RNAi agent or to a subject not receiving the GCK RNAi agent. In some embodiments, imaging tests may be used to diagnose MASLD and/or MASH. These imaging tests may include, but are not limited to, ultrasound, computed tomography (CT) scan, magnetic resonance imaging (MRI), and elastography.

[1450] In some embodiments, the amount or level inflammation in the liver of a subject to whom the described GCK RNAi agent has been administered is reduced by at least about 5%, 10%, 15%, 20%, 25%, 30%, 35%, 40%, 45%, 50%, 55%, 60%, 65%, 70%, 75%, 80%, 85%, 90%, 95%, 96%, 97%, 98%, 99%, or greater than 99% relative to the subject prior to being administered the GCK RNAi agent or to a subject not receiving the GCK RNAi agent. In some embodiments, the amount of fibrotic damage in the liver of a subject to whom the described GCK RNAi agent has been administered is reduced by at least about 5%, 10%, 15%, 20%, 25%, 30%, 35%, 40%, 45%, 50%, 55%, 60%, 65%, 70%, 75%, 80%, 85%, 90%, 95%, 96%, 97%, 98%, 99%, or greater than 99% relative to the subject prior to being administered the GCK RNAi agent or to a subject not receiving the GCK RNAi agent. In some embodiments, reduction in liver inflammation or fibrotic damage may be determined by any method known in the art. In some embodiments, the subject may undergo a liver biopsy in order to diagnosis fibrosis.

[1451] In some embodiments, the RNAi agent or compositions containing the same are co-administered with one or more additional therapeutic agents or in connection with another therapeutic intervention, either simultaneously or sequentially in any order. In some contexts, the RNAi agent or compositions are co-administered with another therapy sufficiently close in time such that the RNAi agent enhances the effect of one or more additional therapeutic agents, or vice versa. In some embodiments, the RNAi agent or compositions are administered prior to the one or more additional therapeutic agents. In some embodiments, the RNAi agent or compositions are administered after to the one or more additional therapeutic agents.

### V. ARTICLES OF MANUFACTURE AND KITS

[1452] Also provided are articles of manufacture containing the RNAi agent and/or compositions thereof. The articles of manufacture may include a container and a label or package insert on or associated with the container. Suitable containers include, for example, bottles, vials, syringes, IV solution bags, etc. The containers may be formed from a variety of materials such as glass or plastic. The container in some embodiments holds a composition which is by itself or combined with another composition effective for treating, preventing and/or diagnosing the condition. In some embodiments, the container has a sterile access port. Exemplary containers include an intravenous solution bags, vials, including those with stoppers pierceable by a needle for injection, or bottles or vials for orally administered agents. The label or package insert may indicate that the composition is used for treating a disease or condition.

[1453] The article of manufacture may further include a package insert indicating that the compositions can be used to treat a particular condition. Alternatively, or additionally, the article of manufacture may further include another or the same container comprising a pharmaceutically-acceptable buffer. It may further include other materials such as other buffers, diluents, filters, needles, and/or syringes.

### VI. EXEMPLARY EMBODIMENTS

[1454] The following embodiments are exemplary and are not intended to limit the scope of the invention or inventions described herein. Among the provided embodiments are:

[1455] Embodiment 1. An RNAi agent that inhibits expression of glucokinase (GCK) for use in the treatment of metabolic dysfunction-associated steatotic liver disease (MASLD) or metabolic dysfunction-associated steatotic liver (MASL) in a subject, wherein the RNAi agent comprises (i) an antisense strand and a sense strand that at least partially complements the antisense strand, and (ii) a targeting ligand conjugated to the antisense strand or the sense strand, wherein the targeting ligand targets a hepatocyte.

[1456] Embodiment 2. A n RNAi agent that inhibits expression of glucokinase (GCK) comprising an antisense strand and a sense strand that at least partially complements the antisense strand, and a targeting ligand conjugated to the antisense strand or the sense strand, wherein the targeting ligand targets a hepatocyte.

[1457] Embodiment 3. An RNAi agent that inhibits expression of glucokinase (GCK) comprising an antisense strand and a sense strand that at least partially complements the antisense strand, wherein:
[1458] (a) the antisense strand comprises at least 14 contiguous bases from any one of SE Q ID NO S: 1-96; and/or
[1459] (b) the sense strand comprises at least 14 contiguous bases from any one of SEQ ID NOS: 97-192.

[1460] Embodiment 4. The RNAi agent of any one of embodiments 1-3, wherein one or more bases of the antisense stand and/or the sense strand are modified.

[1461] Embodiment 5. The RNAi agent of embodiment 4, wherein the antisense strand has a modification pattern according to nsNfsnnnNfnnnnnnnNfnNfnnnnnsnsn.

[1462] Embodiment 6. The RNAi agent of embodiment 4 or 5, wherein the sense strand has a modification pattern according to nsnsnnnnNfnNfNfNfnnnnnnnnsnsn.

[1463] Embodiment 7. The RNAi agent of embodiment 4 or 5, wherein the sense strand has a modification pattern according to nsnsnnnnNfnNfNfNfnnnnnnnnnn.

[1464] Embodiment 8. The RNAi agent of any one of embodiments 1-7, wherein:
[1465] (a) the antisense strand comprises at least 14 contiguous bases from any one of SEQ ID NOS: 193-288; and/or
[1466] (b) the sense strand comprises at least 14 contiguous bases from any one of SEQ ID NOS: 289-384 and 385-480.

[1467] Embodiment 9. The RNAi agent of any one of embodiments 1-8, wherein the antisense strand comprises at least 14 contiguous bases that complement a sequence in an mRNA molecule that encodes GCK (SEQ ID NO: 481).

[1468] Embodiment 10. The RNAi agent of any one of embodiments 1-9, wherein the antisense strand and the sense strand form a duplex of at least 14 bases in length.

[1469] Embodiment 11. The RNAi agent of any one of embodiments 1-10, wherein the antisense strand and the sense strand form a duplex of between 15 and 30 bases in length.

[1470] Embodiment 12. The RNAi agent of any one of embodiments 1-11, wherein the antisense strand or a subsequence thereof differs by 0, 1, 2, 3, or 4 nucleotides from an equal length portion of any one of SEQ ID NOS: 1-96 and 193-288, wherein the subsequence is at least 14, 15, 16, 17, 18, 19, 20, 21, 22, or 23 bases in length.

[1471] Embodiment 13. The RNAi agent of embodiment 12, wherein the antisense strand comprises, in order, nucleotides 1-23 of any one of SEQ ID NOS: 1-96 and 193-288.

[1472] Embodiment 14. The RNAi agent of any one of embodiments 1-13, wherein the antisense strand comprises at least 14 contiguous bases from any one of SEQ ID NOS: 1-96 and 193-288.

[1473] Embodiment 15. The RNAi agent of any one of embodiments 1-14, wherein the antisense strand comprises, in order, nucleobases 1-14 of any one of SEQ ID NOS: 1-96 and 193-288.

[1474] Embodiment 16. The RNAi agent of any one of embodiments 1-15, wherein the antisense strand comprises at least 14 contiguous bases from any one of SEQ ID NOS: 8, 11, 14, 16, 35, 36, 38, 39, 41, 42, 52, 77, 84, 86, 87, 88, 89, 90, 93, 200, 203, 206, 208, 227, 228, 230, 231, 233, 234, 244, 269, 276, 278, 279, 280, 281, 282, and 285.

[1475] Embodiment 17. The RNAi agent of any one of embodiments 1-16, wherein the antisense strand comprises at least 14 contiguous bases from any one of SEQ ID NOS: 16, 35, 52, 84, 86, 89, 90, 208, 227, 244, 276, 278, 281, and 282.

[1476] Embodiment 18. The RNAi agent of any one of embodiments 1-17, wherein the sense strand or a subsequence thereof differs by 0, 1, 2, 3, or 4 nucleotides from an equal length portion of any one of SEQ ID NOS: 97-192, 289-384, and 385-480, wherein the subsequence is at least 14, 15, 16, 17, 18, 19, 20, or 21 bases in length.

[1477] Embodiment 19. The RNAi agent of embodiment 18, wherein the sense strand comprises, in order, nucleotides 1-21 of any one of SEQ ID NOS: 97-192, 289-384, and 385-480.

[1478] Embodiment 20. The RNAi agent of any one of embodiments 1-19, wherein the sense strand comprises at least 14 contiguous bases from any one of SEQ ID NOS: 97-192, 289-384, and 385-480.

[1479] Embodiment 21. The RNAi agent of any one of embodiments 1-20, wherein the sense strand comprises, in order, nucleobases 1-14 of any one of SEQ ID NOS: 97-192, 289-384, and 385-480.

[1480] Embodiment 22. The RNAi agent of embodiment 21, wherein the sense strand comprises at least 14 contiguous bases from any one of SEQ ID NOS:104, 107, 110, 112, 131, 132, 134, 135, 137, 138, 148, 173, 180, 182, 183, 184, 185, 186, 189, 296, 299, 302, 304, 323, 324, 326, 327, 329, 330, 340, 365, 372, 374, 375, 376, 377, 378, 381, 392, 395, 398, 400, 419, 420, 422, 423, 425 426, 436, 461, 468, 470, 471, 472, 473, 474, and 477.

[1481] Embodiment 23. The RNAi agent of embodiment 21 or 22, wherein the sense strand comprises at least 14 contiguous bases from any one of SEQ ID NOS: 112, 131, 148, 180, 182, 185, 186, 304, 323, 340, 372, 374, 377, 378, 400, 419, 436, 468, 470, 473, and 474.

[1482] Embodiment 24. The RNAi agent of any one of embodiments 1-23, wherein the antisense strand comprises at least 16 contiguous bases that complement a sequence in an mRNA molecule that encodes GCK (SEQ ID NO: 481).

[1483] Embodiment 25. The RNAi agent of any one of embodiments 1-24, wherein the antisense strand and the sense strand form a duplex of at least 16 bases in length.

[1484] Embodiment 26. The RNAi agent of any one of embodiments 1-25, wherein the antisense strand comprises at least 16 contiguous bases from any one of SEQ ID NOS: 1-96 and 193-288.

[1485] Embodiment 27. The RNAi agent of embodiment 26, wherein the antisense strand comprises at least 16 contiguous bases from any one of SEQ ID NOS: 8, 11, 14, 16, 35, 36, 38, 39, 41, 42, 52, 77, 84, 86, 87, 88, 89, 90, 93, 200, 203, 206, 208, 227, 228, 230, 231, 233, 234, 244, 269, 276, 278, 279, 280, 281, 282, and 285.

[1486] Embodiment 28. The RNAi agent of any one of embodiments 1-27, wherein the antisense strand comprises, in order, nucleobases 1-16, 1-17, 1-18, 1-19, 1-20, 1-21, 1-22, 1-23, 2-17, 2-18, 2-19, 2-20, 2-21, 2-22, 2-23, 3-18, 3-19, 3-20, 3-21, 3-22, 3-23, 4-19, 4-20, 4-21, 4-22, 4-23, 5-21, 5-22, 5-23, 6-20, 6-21, 6-22, 6-23, 7-22, 7-23, or 8-23 of any one of SEQ ID NOS: 1-96 and 193-288.

[1487] Embodiment 29. The RNAi agent of any one of embodiments 1-28, wherein the antisense strand comprises a nucleotide sequence according to any one of SEQ ID NOS: 1-96 and 193-288.

[1488] Embodiment 30. The RNAi agent of embodiment 29, wherein one or more nucleotides are modified.

[1489] Embodiment 31. The RNAi agent of embodiment 29, wherein the antisense strand comprises a nucleotide sequence according to any one of SEQ ID NOS: 8, 11, 14, 16, 35, 36, 38, 39, 41, 42, 52, 77, 84, 86, 87, 88, 89, 90, and 93.

[1490] Embodiment 32. The RNAi agent of embodiment 29 or 31, wherein the antisense strand comprises a nucleotide sequence according to any one of SEQ ID NOS: 16, 35, 52, 84, 86, 89, and 90.

[1491] Embodiment 33. The RNAi agent of embodiment 31 or 32, wherein one or more nucleotides are modified.

[1492] Embodiment 34. The RNAi agent of embodiment 30 or 33, wherein the antisense strand has a modification pattern according to nsNfsnnnNfnnnnnnnNfnNfnnnnnsnsn.

[1493] Embodiment 35. The RNAi agent of any one of embodiments 29-34, wherein the antisense strand comprises a modified nucleotide sequence according to any one of SEQ ID NOS: 193-288.

[1494] Embodiment 36. The RNAi agent of embodiment 35, wherein the antisense strand comprises a modified nucleotide sequence according to any one of SEQ ID NOS: 200, 203, 206, 208, 227, 228, 230, 231, 233, 234, 244, 269, 276, 278, 279, 280, 281, 282, and 285.

[1495] Embodiment 37. The RNAi agent of embodiment 35 or 36, wherein the antisense strand comprises a modified nucleotide sequence according to any one of SEQ ID NOS: 208, 227, 244, 276, 278, 281, and 282.

[1496] Embodiment 38. The RNAi agent of any one of embodiments 1-37, wherein the sense strand comprises at least 16 contiguous bases from any one of SEQ ID NOS: 97-192, 289-384, and 385-480.

[1497] Embodiment 39. The RNAi agent of embodiment 38, wherein the sense strand comprises at least 16 contiguous bases from any one of SEQ ID NOS: 104, 107, 110, 112, 131, 132, 134, 135, 137, 138, 148, 173, 180, 182, 183, 184, 185, 186, 189, 296, 299, 302, 304, 323, 324, 326, 327, 329, 330, 340, 365, 372, 374, 375, 376, 377, 378, 381, 392, 395, 398, 400, 419, 420, 422, 423, 425 426, 436, 461, 468, 470, 471, 472, 473, 474, and 477.

[1498] Embodiment 40. The RNAi agent of embodiment 38 or 39, wherein the sense strand comprises at least 16 contiguous bases from any one of SEQ ID NOS: 112, 131, 148, 180, 182, 185, 186, 304, 323, 340, 372, 374, 377, 378, 400, 419, 436, 468, 470, 473, and 474.

[1499] Embodiment 41. The RNAi agent of any one of embodiments 1-40, wherein the sense strand comprises, in order, nucleobases 1-16, 1-17, 1-18, 1-19, 1-20, 1-21, 1-22, 1-23, 2-17, 2-18, 2-19, 2-20, 2-21, 2-22, 2-23, 3-18, 3-19, 3-20, 3-21, 3-22, 3-23, 4-19, 4-20, 4-21, 4-22, 4-23, 5-21, 5-22, 5-23, 6-20, 6-21, 6-22, 6-23, 7-22, 7-23, or 8-23 of any one of SEQ ID NOS: 97-192, 289-384, and 385-480.

[1500] Embodiment 42. The RNAi agent of any one of embodiments 1-41, wherein the sense strand comprises a nucleobase sequence according to any one of SEQ ID NOS: 97-192, 289-384, and 385-480.

[1501] Embodiment 43. The RNAi agent of embodiment 42, wherein one or more nucleotides are modified.

[1502] Embodiment 44. The RNAi agent of embodiment 42, wherein the sense strand comprises a nucleobase sequence according to any one of SEQ ID NOS: 104, 107, 110, 112, 131, 132, 134, 135, 137, 138, 148, 173, 180, 182, 183, 184, 185, 186, and 189.

[1503] Embodiment 45. The RNAi agent of embodiment 42 or 44, wherein the sense strand comprises a nucleobase sequence according to any one of SEQ ID NOS: 112, 131, 148, 180, 182, 185, and 186.

[1504] Embodiment 46. The RNAi agent of embodiment 44 or 45, wherein one or more nucleotides are modified.

[1505] Embodiment 47. The RNAi agent of embodiment 43 or 46, wherein the sense strand has a modification pattern according to nsnsnnnnNfnNfNfNfnnnnnnnnsnsn.

[1506] Embodiment 48. The RNAi agent of embodiment 43 or 46, wherein the sense strand has a modification pattern according to nsnsnnnnNfnNfNfNfnnnnnnnnnn.

[1507] Embodiment 49. The RNAi agent of any one of embodiments 42-48, wherein the sense strand comprises a modified nucleotide sequence according to any one of SEQ ID NOS: 289-384 and 385-480.

[1508] Embodiment 50. The RNAi agent of embodiment 49, wherein the sense strand comprises a modified nucleotide sequence according to any one of SEQ ID NOS: 296, 299, 302, 304, 323, 324, 326, 327, 329, 330, 340, 365, 372, 374, 375, 376, 377, 378, 381, 392, 395, 398, 400, 419, 420, 422, 423, 425 426, 436, 461, 468, 470, 471, 472, 473, 474, and 477.

[1509] Embodiment 51. The RNAi agent of embodiment 49 or 50, wherein the sense strand comprises a modified nucleotide sequence according to any one of SEQ ID NOS: 304, 323, 340, 372, 374, 377, 378, 400, 419, 436, 468, 470, 473, and 474.

[1510] Embodiment 52. The RNAi agent of any one of embodiments 1-51, wherein:
[1511] (a) the sense strand comprises a nucleobase sequence according to SEQ ID NO: 97 and the antisense strand comprises a nucleobase sequence according to SEQ ID NO: 1;
[1512] (b) the sense strand comprises a nucleobase sequence according to SEQ ID NO: 98 and the antisense strand comprises a nucleobase sequence according to SEQ ID NO: 2;
[1513] (c) the sense strand comprises a nucleobase sequence according to SEQ ID NO: 99 and the antisense strand comprises a nucleobase sequence according to SEQ ID NO: 3;
[1514] (d) the sense strand comprises a nucleobase sequence according to SEQ ID NO: 100 and the antisense strand comprises a nucleobase sequence according to SEQ ID NO: 4;
[1515] (e) the sense strand comprises a nucleobase sequence according to SEQ ID NO: 101 and the antisense strand comprises a nucleobase sequence according to SEQ ID NO: 5;
[1516] (f) the sense strand comprises a nucleobase sequence according to SEQ ID NO: 102 and the antisense strand comprises a nucleobase sequence according to SEQ ID NO: 6;
[1517] (g) the sense strand comprises a nucleobase sequence according to SEQ ID NO: 103 and the antisense strand comprises a nucleobase sequence according to SEQ ID NO: 7;
[1518] (h) the sense strand comprises a nucleobase sequence according to SEQ ID NO: 104 and the antisense strand comprises a nucleobase sequence according to SEQ ID NO: 8;
[1519] (i) the sense strand comprises a nucleobase sequence according to SEQ ID NO: 105 and the antisense strand comprises a nucleobase sequence according to SEQ ID NO: 9;
[1520] (j) the sense strand comprises a nucleobase sequence according to SEQ ID NO: 106 and the antisense strand comprises a nucleobase sequence according to SEQ ID NO: 10;
[1521] (k) the sense strand comprises a nucleobase sequence according to SEQ ID NO: 107 and the antisense strand comprises a nucleobase sequence according to SEQ ID NO: 11;
[1522] (l) the sense strand comprises a nucleobase sequence according to SEQ ID NO: 108 and the antisense strand comprises a nucleobase sequence according to SEQ ID NO: 12;
[1523] (m) the sense strand comprises a nucleobase sequence according to SEQ ID NO: 109 and the antisense strand comprises a nucleobase sequence according to SEQ ID NO: 13;
[1524] (n) the sense strand comprises a nucleobase sequence according to SEQ ID NO: 110 and the antisense strand comprises a nucleobase sequence according to SEQ ID NO: 14;
[1525] (o) the sense strand comprises a nucleobase sequence according to SEQ ID NO: 111 and the antisense strand comprises a nucleobase sequence according to SEQ ID NO: 15;
[1526] (p) the sense strand comprises a nucleobase sequence according to SEQ ID NO: 112 and the antisense strand comprises a nucleobase sequence according to SEQ ID NO: 16;
[1527] (q) the sense strand comprises a nucleobase sequence according to SEQ ID NO: 113 and the antisense strand comprises a nucleobase sequence according to SEQ ID NO: 17;
[1528] (r) the sense strand comprises a nucleobase sequence according to SEQ ID NO: 114 and the antisense strand comprises a nucleobase sequence according to SEQ ID NO: 18;
[1529] (s) the sense strand comprises a nucleobase sequence according to SEQ ID NO: 115 and the antisense strand comprises a nucleobase sequence according to SEQ ID NO: 19;
[1530] (t) the sense strand comprises a nucleobase sequence according to SEQ ID NO: 116 and the antisense strand comprises a nucleobase sequence according to SEQ ID NO: 20;
[1531] (u) the sense strand comprises a nucleobase sequence according to SEQ ID NO: 117 and the antisense strand comprises a nucleobase sequence according to SEQ ID NO: 21;
[1532] (v) the sense strand comprises a nucleobase sequence according to SEQ ID NO: 118 and the antisense strand comprises a nucleobase sequence according to SEQ ID NO: 22;
[1533] (w) the sense strand comprises a nucleobase sequence according to SEQ ID NO: 119 and the antisense strand comprises a nucleobase sequence according to SEQ ID NO: 23;
[1534] (x) the sense strand comprises a nucleobase sequence according to SEQ ID NO: 120 and the antisense strand comprises a nucleobase sequence according to SEQ ID NO: 24;
[1535] (y) the sense strand comprises a nucleobase sequence according to SEQ ID NO: 121 and the antisense strand comprises a nucleobase sequence according to SEQ ID NO: 25;
[1536] (z) the sense strand comprises a nucleobase sequence according to SEQ ID NO: 122 and the antisense strand comprises a nucleobase sequence according to SEQ ID NO: 26;
[1537] (aa) the sense strand comprises a nucleobase sequence according to SEQ ID NO: 123 and the antisense strand comprises a nucleobase sequence according to SEQ ID NO: 27;
[1538] (bb) the sense strand comprises a nucleobase sequence according to SEQ ID NO: 124 and the antisense strand comprises a nucleobase sequence according to SEQ ID NO: 28;
[1539] (cc) the sense strand comprises a nucleobase sequence according to SEQ ID NO: 125 and the antisense strand comprises a nucleobase sequence according to SEQ ID NO: 29;
[1540] (dd) the sense strand comprises a nucleobase sequence according to SEQ ID NO: 126 and the antisense strand comprises a nucleobase sequence according to SEQ ID NO: 30;
[1541] (ee) the sense strand comprises a nucleobase sequence according to SEQ ID NO: 127 and the antisense strand comprises a nucleobase sequence according to SEQ ID NO: 31;
[1542] (ff) the sense strand comprises a nucleobase sequence according to SEQ ID NO: 128 and the antisense strand comprises a nucleobase sequence according to SEQ ID NO: 32;
[1543] (gg) the sense strand comprises a nucleobase sequence according to SEQ ID NO: 129 and the antisense strand comprises a nucleobase sequence according to SEQ ID NO: 33;
[1544] (hh) the sense strand comprises a nucleobase sequence according to SEQ ID NO: 130 and the antisense strand comprises a nucleobase sequence according to SEQ ID NO: 34;
[1545] (ii) the sense strand comprises a nucleobase sequence according to SEQ ID NO: 131 and the antisense strand comprises a nucleobase sequence according to SEQ ID NO: 35;
[1546] (jj) the sense strand comprises a nucleobase sequence according to SEQ ID NO: 132 and the antisense strand comprises a nucleobase sequence according to SEQ ID NO: 36;
[1547] (kk) the sense strand comprises a nucleobase sequence according to SEQ ID NO: 133 and the antisense strand comprises a nucleobase sequence according to SEQ ID NO: 37;
[1548] (ll) the sense strand comprises a nucleobase sequence according to SEQ ID NO: 134 and the antisense strand comprises a nucleobase sequence according to SEQ ID NO: 38;
[1549] (mm) the sense strand comprises a nucleobase sequence according to SEQ ID NO: 135 and the antisense strand comprises a nucleobase sequence according to SEQ ID NO: 39;
[1550] (nn) the sense strand comprises a nucleobase sequence according to SEQ ID NO: 136 and the antisense strand comprises a nucleobase sequence according to SEQ ID NO: 40;
[1551] (oo) the sense strand comprises a nucleobase sequence according to SEQ ID NO: 137 and the antisense strand comprises a nucleobase sequence according to SEQ ID NO: 41;
[1552] (pp) the sense strand comprises a nucleobase sequence according to SEQ ID NO: 138 and the antisense strand comprises a nucleobase sequence according to SEQ ID NO: 42;
[1553] (qq) the sense strand comprises a nucleobase sequence according to SEQ ID NO: 139 and the antisense strand comprises a nucleobase sequence according to SEQ ID NO: 43;
[1554] (rr) the sense strand comprises a nucleobase sequence according to SEQ ID NO: 140 and the antisense strand comprises a nucleobase sequence according to SEQ ID NO: 44;
[1555] (ss) the sense strand comprises a nucleobase sequence according to SEQ ID NO: 141 and the antisense strand comprises a nucleobase sequence according to SEQ ID NO: 45;
[1556] (tt) the sense strand comprises a nucleobase sequence according to SEQ ID NO: 142 and the antisense strand comprises a nucleobase sequence according to SEQ ID NO: 46;
[1557] (uu) the sense strand comprises a nucleobase sequence according to SEQ ID NO: 143 and the antisense strand comprises a nucleobase sequence according to SEQ ID NO: 47;
[1558] (vv) the sense strand comprises a nucleobase sequence according to SEQ ID NO: 144 and the antisense strand comprises a nucleobase sequence according to SEQ ID NO: 48;
[1559] (ww) the sense strand comprises a nucleobase sequence according to SEQ ID NO: 145 and the antisense strand comprises a nucleobase sequence according to SEQ ID NO: 49;
[1560] (xx) the sense strand comprises a nucleobase sequence according to SEQ ID NO: 146 and the antisense strand comprises a nucleobase sequence according to SEQ ID NO: 50;
[1561] (yy) the sense strand comprises a nucleobase sequence according to SEQ ID NO: 147 and the antisense strand comprises a nucleobase sequence according to SEQ ID NO: 51;
[1562] (zz) the sense strand comprises a nucleobase sequence according to SEQ ID NO: 148 and the antisense strand comprises a nucleobase sequence according to SEQ ID NO: 52;
[1563] (aaa) the sense strand comprises a nucleobase sequence according to SEQ ID NO: 149 and the antisense strand comprises a nucleobase sequence according to SEQ ID NO: 53;
[1564] (bbb) the sense strand comprises a nucleobase sequence according to SEQ ID NO: 150 and the antisense strand comprises a nucleobase sequence according to SEQ ID NO: 54;
[1565] (ccc) the sense strand comprises a nucleobase sequence according to SEQ ID NO: 151 and the antisense strand comprises a nucleobase sequence according to SEQ ID NO: 55;
[1566] (ddd) the sense strand comprises a nucleobase sequence according to SEQ ID NO: 152 and the antisense strand comprises a nucleobase sequence according to SEQ ID NO: 56;
[1567] (eee) the sense strand comprises a nucleobase sequence according to SEQ ID NO: 153 and the antisense strand comprises a nucleobase sequence according to SEQ ID NO: 57;
[1568] (fff) the sense strand comprises a nucleobase sequence according to SEQ ID NO: 154 and the antisense strand comprises a nucleobase sequence according to SEQ ID NO: 58;
[1569] (ggg) the sense strand comprises a nucleobase sequence according to SEQ ID NO: 155 and the antisense strand comprises a nucleobase sequence according to SEQ ID NO: 59;
[1570] (hhh) the sense strand comprises a nucleobase sequence according to SEQ ID NO: 156 and the antisense strand comprises a nucleobase sequence according to SEQ ID NO: 60;
[1571] (iii) the sense strand comprises a nucleobase sequence according to SEQ ID NO: 157 and the antisense strand comprises a nucleobase sequence according to SEQ ID NO: 61;
[1572] (jjj) the sense strand comprises a nucleobase sequence according to SEQ ID NO: 158 and the antisense strand comprises a nucleobase sequence according to SEQ ID NO: 62;
[1573] (kkk) the sense strand comprises a nucleobase sequence according to SEQ ID NO: 159 and the antisense strand comprises a nucleobase sequence according to SEQ ID NO: 63;
[1574] (lll) the sense strand comprises a nucleobase sequence according to SEQ ID NO: 160 and the antisense strand comprises a nucleobase sequence according to SEQ ID NO: 64;
[1575] (mmm) the sense strand comprises a nucleobase sequence according to SEQ ID NO: 161 and the antisense strand comprises a nucleobase sequence according to SEQ ID NO: 65;
[1576] (nnn) the sense strand comprises a nucleobase sequence according to SEQ ID NO: 162 and the antisense strand comprises a nucleobase sequence according to SEQ ID NO: 66;
[1577] (ooo) the sense strand comprises a nucleobase sequence according to SEQ ID NO: 163 and the antisense strand comprises a nucleobase sequence according to SEQ ID NO: 67;
[1578] (ppp) the sense strand comprises a nucleobase sequence according to SEQ ID NO: 164 and the antisense strand comprises a nucleobase sequence according to SEQ ID NO: 68;
[1579] (qqq) the sense strand comprises a nucleobase sequence according to SEQ ID NO: 165 and the antisense strand comprises a nucleobase sequence according to SEQ ID NO: 69;
[1580] (rrr) the sense strand comprises a nucleobase sequence according to SEQ ID NO: 166 and the antisense strand comprises a nucleobase sequence according to SEQ ID NO: 70;
[1581] (sss) the sense strand comprises a nucleobase sequence according to SEQ ID NO: 167 and the antisense strand comprises a nucleobase sequence according to SEQ ID NO: 71;
[1582] (ttt) the sense strand comprises a nucleobase sequence according to SEQ ID NO: 168 and the antisense strand comprises a nucleobase sequence according to SEQ ID NO: 72;
[1583] (uuu) the sense strand comprises a nucleobase sequence according to SEQ ID NO: 169 and the antisense strand comprises a nucleobase sequence according to SEQ ID NO: 73;
[1584] (vvv) the sense strand comprises a nucleobase sequence according to SEQ ID NO: 170 and the antisense strand comprises a nucleobase sequence according to SEQ ID NO: 74;
[1585] (www) the sense strand comprises a nucleobase sequence according to SEQ ID NO: 171 and the antisense strand comprises a nucleobase sequence according to SEQ ID NO: 75;
[1586] (xxx) the sense strand comprises a nucleobase sequence according to SEQ ID NO: 172 and the antisense strand comprises a nucleobase sequence according to SEQ ID NO: 76;
[1587] (yyy) the sense strand comprises a nucleobase sequence according to SEQ ID NO: 173 and the antisense strand comprises a nucleobase sequence according to SEQ ID NO: 77;
[1588] (zzz) the sense strand comprises a nucleobase sequence according to SEQ ID NO: 174 and the antisense strand comprises a nucleobase sequence according to SEQ ID NO: 78;
[1589] (aaaa) the sense strand comprises a nucleobase sequence according to SEQ ID NO: 175 and the antisense strand comprises a nucleobase sequence according to SEQ ID NO: 79;
[1590] (bbbb) the sense strand comprises a nucleobase sequence according to SEQ ID NO: 176 and the antisense strand comprises a nucleobase sequence according to SEQ ID NO: 80;
[1591] (cccc) the sense strand comprises a nucleobase sequence according to SEQ ID NO: 177 and the antisense strand comprises a nucleobase sequence according to SEQ ID NO: 81;
[1592] (dddd) the sense strand comprises a nucleobase sequence according to SEQ ID NO: 178 and the antisense strand comprises a nucleobase sequence according to SEQ ID NO: 82;
[1593] (eeee) the sense strand comprises a nucleobase sequence according to SEQ ID NO: 179 and the antisense strand comprises a nucleobase sequence according to SEQ ID NO: 83;
[1594] (ffff) the sense strand comprises a nucleobase sequence according to SEQ ID NO: 180 and the antisense strand comprises a nucleobase sequence according to SEQ ID NO: 84;
[1595] (gggg) the sense strand comprises a nucleobase sequence according to SEQ ID NO: 181 and the antisense strand comprises a nucleobase sequence according to SEQ ID NO: 85;
[1596] (hhhh) the sense strand comprises a nucleobase sequence according to SEQ ID NO: 182 and the antisense strand comprises a nucleobase sequence according to SEQ ID NO: 86;
[1597] (iiii) the sense strand comprises a nucleobase sequence according to SEQ ID NO: 183 and the antisense strand comprises a nucleobase sequence according to SEQ ID NO: 87;
[1598] (jjjj) the sense strand comprises a nucleobase sequence according to SEQ ID NO: 184 and the antisense strand comprises a nucleobase sequence according to SEQ ID NO: 88;
[1599] (kkkk) the sense strand comprises a nucleobase sequence according to SEQ ID NO: 185 and the antisense strand comprises a nucleobase sequence according to SEQ ID NO: 89;
[1600] (llll) the sense strand comprises a nucleobase sequence according to SEQ ID NO: 186 and the antisense strand comprises a nucleobase sequence according to SEQ ID NO: 90;
[1601] (mmmm) the sense strand comprises a nucleobase sequence according to SEQ ID NO: 187 and the antisense strand comprises a nucleobase sequence according to SEQ ID NO: 91;
[1602] (nnnn) the sense strand comprises a nucleobase sequence according to SEQ ID NO: 188 and the antisense strand comprises a nucleobase sequence according to SEQ ID NO: 92;
[1603] (oooo) the sense strand comprises a nucleobase sequence according to SEQ ID NO: 189 and the antisense strand comprises a nucleobase sequence according to SEQ ID NO: 93;
[1604] (pppp) the sense strand comprises a nucleobase sequence according to SEQ ID NO: 190 and the antisense strand comprises a nucleobase sequence according to SEQ ID NO: 94;
[1605] (qqqq) the sense strand comprises a nucleobase sequence according to SEQ ID NO: 191 and the antisense strand comprises a nucleobase sequence according to SEQ ID NO: 95; or
[1606] (rrrr) the sense strand comprises a nucleobase sequence according to SEQ ID NO: 192 and the antisense strand comprises a nucleobase sequence according to SEQ ID NO: 96.

[1607] Embodiment 53. The RNAi agent of embodiment 52, wherein:
[1608] (a) the sense strand comprises a nucleobase sequence according to SEQ ID NO: 112 and the antisense strand comprises a nucleobase sequence according to SEQ ID NO: 16;
[1609] (b) the sense strand comprises a nucleobase sequence according to SEQ ID NO: 131 and the antisense strand comprises a nucleobase sequence according to SEQ ID NO: 35;
[1610] (c) the sense strand comprises a nucleobase sequence according to SEQ ID NO: 148 and the antisense strand comprises a nucleobase sequence according to SEQ ID NO: 52;
[1611] (d) the sense strand comprises a nucleobase sequence according to SEQ ID NO: 180 and the antisense strand comprises a nucleobase sequence according to SEQ ID NO: 84;
[1612] (e) the sense strand comprises a nucleobase sequence according to SEQ ID NO: 182 and the antisense strand comprises a nucleobase sequence according to SEQ ID NO: 86;
[1613] (f) the sense strand comprises a nucleobase sequence according to SEQ ID NO: 185 and the antisense strand comprises a nucleobase sequence according to SEQ ID NO: 89; or
[1614] (g) the sense strand comprises a nucleobase sequence according to SEQ ID NO: 186 and the antisense strand comprises a nucleobase sequence according to SEQ ID NO: 90.

[1615] Embodiment 54. The RNAi agent of embodiment 52 or 53, wherein:
[1616] (a) the sense strand comprises a modified nucleotide sequence according to SEQ ID NO: 289 and the antisense strand comprises a modified nucleotide sequence according to SEQ ID NO: 193;
[1617] (b) the sense strand comprises a modified nucleotide sequence according to SEQ ID NO: 290 and the antisense strand comprises a modified nucleotide sequence according to SEQ ID NO: 194;
[1618] (c) the sense strand comprises a modified nucleotide sequence according to SEQ ID NO: 291 and the antisense strand comprises a modified nucleotide sequence according to SEQ ID NO: 195;
[1619] (d) the sense strand comprises a modified nucleotide sequence according to SEQ ID NO: 292 and the antisense strand comprises a modified nucleotide sequence according to SEQ ID NO: 196;
[1620] (e) the sense strand comprises a modified nucleotide sequence according to SEQ ID NO: 293 and the antisense strand comprises a modified nucleotide sequence according to SEQ ID NO: 197;
[1621] (f) the sense strand comprises a modified nucleotide sequence according to SEQ ID NO: 294 and the antisense strand comprises a modified nucleotide sequence according to SEQ ID NO: 198;
[1622] (g) the sense strand comprises a modified nucleotide sequence according to SEQ ID NO: 295 and the antisense strand comprises a modified nucleotide sequence according to SEQ ID NO: 199;
[1623] (h) the sense strand comprises a modified nucleotide sequence according to SEQ ID NO: 296 and the antisense strand comprises a modified nucleotide sequence according to SEQ ID NO: 200;
[1624] (i) the sense strand comprises a modified nucleotide sequence according to SEQ ID NO: 297 and the antisense strand comprises a modified nucleotide sequence according to SEQ ID NO: 201;
[1625] (j) the sense strand comprises a modified nucleotide sequence according to SEQ ID NO: 298 and the antisense strand comprises a modified nucleotide sequence according to SEQ ID NO: 202;
[1626] (k) the sense strand comprises a modified nucleotide sequence according to SEQ ID NO: 299 and the antisense strand comprises a modified nucleotide sequence according to SEQ ID NO: 203;
[1627] (l) the sense strand comprises a modified nucleotide sequence according to SEQ ID NO: 300 and the antisense strand comprises a modified nucleotide sequence according to SEQ ID NO: 204;
[1628] (m) the sense strand comprises a modified nucleotide sequence according to SEQ ID NO: 301 and the antisense strand comprises a modified nucleotide sequence according to SEQ ID NO: 205;
[1629] (n) the sense strand comprises a modified nucleotide sequence according to SEQ ID NO: 302 and the antisense strand comprises a modified nucleotide sequence according to SEQ ID NO: 206;
[1630] (o) the sense strand comprises a modified nucleotide sequence according to SEQ ID NO: 303 and the antisense strand comprises a modified nucleotide sequence according to SEQ ID NO: 207;
[1631] (p) the sense strand comprises a modified nucleotide sequence according to SEQ ID NO: 304 and the antisense strand comprises a modified nucleotide sequence according to SEQ ID NO: 208;
[1632] (q) the sense strand comprises a modified nucleotide sequence according to SEQ ID NO: 305 and the antisense strand comprises a modified nucleotide sequence according to SEQ ID NO: 209;
[1633] (r) the sense strand comprises a modified nucleotide sequence according to SEQ ID NO: 306 and the antisense strand comprises a modified nucleotide sequence according to SEQ ID NO: 210;
[1634] (s) the sense strand comprises a modified nucleotide sequence according to SEQ ID NO: 307 and the antisense strand comprises a modified nucleotide sequence according to SEQ ID NO: 211;
[1635] (t) the sense strand comprises a modified nucleotide sequence according to SEQ ID NO: 308 and the antisense strand comprises a modified nucleotide sequence according to SEQ ID NO: 212;
[1636] (u) the sense strand comprises a modified nucleotide sequence according to SEQ ID NO: 309 and the antisense strand comprises a modified nucleotide sequence according to SEQ ID NO: 213;
[1637] (v) the sense strand comprises a modified nucleotide sequence according to SEQ ID NO: 310 and the antisense strand comprises a modified nucleotide sequence according to SEQ ID NO: 214;
[1638] (w) the sense strand comprises a modified nucleotide sequence according to SEQ ID NO: 311 and the antisense strand comprises a modified nucleotide sequence according to SEQ ID NO: 215;
[1639] (x) the sense strand comprises a modified nucleotide sequence according to SEQ ID NO: 312 and the antisense strand comprises a modified nucleotide sequence according to SEQ ID NO: 216;
[1640] (y) the sense strand comprises a modified nucleotide sequence according to SEQ ID NO: 313 and the antisense strand comprises a modified nucleotide sequence according to SEQ ID NO: 217;
[1641] (z) the sense strand comprises a modified nucleotide sequence according to SEQ ID NO: 314 and the antisense strand comprises a modified nucleotide sequence according to SEQ ID NO: 218;
[1642] (aa) the sense strand comprises a modified nucleotide sequence according to SEQ ID NO: 315 and the antisense strand comprises a modified nucleotide sequence according to SEQ ID NO: 219;
[1643] (bb) the sense strand comprises a modified nucleotide sequence according to SEQ ID NO: 316 and the antisense strand comprises a modified nucleotide sequence according to SEQ ID NO: 220;
[1644] (cc) the sense strand comprises a modified nucleotide sequence according to SEQ ID NO: 317 and the antisense strand comprises a modified nucleotide sequence according to SEQ ID NO: 221;
[1645] (dd) the sense strand comprises a modified nucleotide sequence according to SEQ ID NO: 318 and the antisense strand comprises a modified nucleotide sequence according to SEQ ID NO: 222;
[1646] (ee) the sense strand comprises a modified nucleotide sequence according to SEQ ID NO: 319 and the antisense strand comprises a modified nucleotide sequence according to SEQ ID NO: 223;
[1647] (ff) the sense strand comprises a modified nucleotide sequence according to SEQ ID NO: 320 and the antisense strand comprises a modified nucleotide sequence according to SEQ ID NO: 224;
[1648] (gg) the sense strand comprises a modified nucleotide sequence according to SEQ ID NO: 321 and the antisense strand comprises a modified nucleotide sequence according to SEQ ID NO: 225;
[1649] (hh) the sense strand comprises a modified nucleotide sequence according to SEQ ID NO: 322 and the antisense strand comprises a modified nucleotide sequence according to SEQ ID NO: 226;
[1650] (ii) the sense strand comprises a modified nucleotide sequence according to SEQ ID NO: 323 and the antisense strand comprises a modified nucleotide sequence according to SEQ ID NO: 227;
[1651] (jj) the sense strand comprises a modified nucleotide sequence according to SEQ ID NO: 324 and the antisense strand comprises a modified nucleotide sequence according to SEQ ID NO: 228;
[1652] (kk) the sense strand comprises a modified nucleotide sequence according to SEQ ID NO: 325 and the antisense strand comprises a modified nucleotide sequence according to SEQ ID NO: 229;
[1653] (ll) the sense strand comprises a modified nucleotide sequence according to SEQ ID NO: 326 and the antisense strand comprises a modified nucleotide sequence according to SEQ ID NO: 230;
[1654] (mm) the sense strand comprises a modified nucleotide sequence according to SEQ ID NO: 327 and the antisense strand comprises a modified nucleotide sequence according to SEQ ID NO: 231;
[1655] (nn) the sense strand comprises a modified nucleotide sequence according to SEQ ID NO: 328 and the antisense strand comprises a modified nucleotide sequence according to SEQ ID NO: 232;
[1656] (oo) the sense strand comprises a modified nucleotide sequence according to SEQ ID NO: 329 and the antisense strand comprises a modified nucleotide sequence according to SEQ ID NO: 233;
[1657] (pp) the sense strand comprises a modified nucleotide sequence according to SEQ ID NO: 330 and the antisense strand comprises a modified nucleotide sequence according to SEQ ID NO: 234;
[1658] (qq) the sense strand comprises a modified nucleotide sequence according to SEQ ID NO: 331 and the antisense strand comprises a modified nucleotide sequence according to SEQ ID NO: 235;
[1659] (rr) the sense strand comprises a modified nucleotide sequence according to SEQ ID NO: 332 and the antisense strand comprises a modified nucleotide sequence according to SEQ ID NO: 236;
[1660] (ss) the sense strand comprises a modified nucleotide sequence according to SEQ ID NO: 333 and the antisense strand comprises a modified nucleotide sequence according to SEQ ID NO: 237;
[1661] (tt) the sense strand comprises a modified nucleotide sequence according to SEQ ID NO: 334 and the antisense strand comprises a modified nucleotide sequence according to SEQ ID NO: 238;
[1662] (uu) the sense strand comprises a modified nucleotide sequence according to SEQ ID NO: 335 and the antisense strand comprises a modified nucleotide sequence according to SEQ ID NO: 239;
[1663] (vv) the sense strand comprises a modified nucleotide sequence according to SEQ ID NO: 336 and the antisense strand comprises a modified nucleotide sequence according to SEQ ID NO: 240;
[1664] (ww) the sense strand comprises a modified nucleotide sequence according to SEQ ID NO: 337 and the antisense strand comprises a modified nucleotide sequence according to SEQ ID NO: 241;
[1665] (xx) the sense strand comprises a modified nucleotide sequence according to SEQ ID NO: 338 and the antisense strand comprises a modified nucleotide sequence according to SEQ ID NO: 242;
[1666] (yy) the sense strand comprises a modified nucleotide sequence according to SEQ ID NO: 339 and the antisense strand comprises a modified nucleotide sequence according to SEQ ID NO: 243;
[1667] (zz) the sense strand comprises a modified nucleotide sequence according to SEQ ID NO: 340 and the antisense strand comprises a modified nucleotide sequence according to SEQ ID NO: 244;
[1668] (aaa) the sense strand comprises a modified nucleotide sequence according to SEQ ID NO: 341 and the antisense strand comprises a modified nucleotide sequence according to SEQ ID NO: 245;
[1669] (bbb) the sense strand comprises a modified nucleotide sequence according to SEQ ID NO: 342 and the antisense strand comprises a modified nucleotide sequence according to SEQ ID NO: 246;
[1670] (ccc) the sense strand comprises a modified nucleotide sequence according to SEQ ID NO: 343 and the antisense strand comprises a modified nucleotide sequence according to SEQ ID NO: 247;
[1671] (ddd) the sense strand comprises a modified nucleotide sequence according to SEQ ID NO: 344 and the antisense strand comprises a modified nucleotide sequence according to SEQ ID NO: 248;
[1672] (eee) the sense strand comprises a modified nucleotide sequence according to SEQ ID NO: 345 and the antisense strand comprises a modified nucleotide sequence according to SEQ ID NO: 249;
[1673] (fff) the sense strand comprises a modified nucleotide sequence according to SEQ ID NO: 346 and the antisense strand comprises a modified nucleotide sequence according to SEQ ID NO: 250;
[1674] (ggg) the sense strand comprises a modified nucleotide sequence according to SEQ ID NO: 347 and the antisense strand comprises a modified nucleotide sequence according to SEQ ID NO: 251;
[1675] (hhh) the sense strand comprises a modified nucleotide sequence according to SEQ ID NO: 348 and the antisense strand comprises a modified nucleotide sequence according to SEQ ID NO: 252;
[1676] (iii) the sense strand comprises a modified nucleotide sequence according to SEQ ID NO: 349 and the antisense strand comprises a modified nucleotide sequence according to SEQ ID NO: 253;
[1677] (jjj) the sense strand comprises a modified nucleotide sequence according to SEQ ID NO: 350 and the antisense strand comprises a modified nucleotide sequence according to SEQ ID NO: 254;
[1678] (kkk) the sense strand comprises a modified nucleotide sequence according to SEQ ID NO: 351 and the antisense strand comprises a modified nucleotide sequence according to SEQ ID NO: 255;
[1679] (lll) the sense strand comprises a modified nucleotide sequence according to SEQ ID NO: 352 and the antisense strand comprises a modified nucleotide sequence according to SEQ ID NO: 256;
[1680] (mmm) the sense strand comprises a modified nucleotide sequence according to SEQ ID NO: 353 and the antisense strand comprises a modified nucleotide sequence according to SEQ ID NO: 257;
[1681] (nnn) the sense strand comprises a modified nucleotide sequence according to SEQ ID NO: 354 and the antisense strand comprises a modified nucleotide sequence according to SEQ ID NO: 258;
[1682] (ooo) the sense strand comprises a modified nucleotide sequence according to SEQ ID NO: 355 and the antisense strand comprises a modified nucleotide sequence according to SEQ ID NO: 259;
[1683] (ppp) the sense strand comprises a modified nucleotide sequence according to SEQ ID NO: 356 and the antisense strand comprises a modified nucleotide sequence according to SEQ ID NO: 260;
[1684] (qqq) the sense strand comprises a modified nucleotide sequence according to SEQ ID NO: 357 and the antisense strand comprises a modified nucleotide sequence according to SEQ ID NO: 261;
[1685] (rrr) the sense strand comprises a modified nucleotide sequence according to SEQ ID NO: 358 and the antisense strand comprises a modified nucleotide sequence according to SEQ ID NO: 262;
[1686] (sss) the sense strand comprises a modified nucleotide sequence according to SEQ ID NO: 359 and the antisense strand comprises a modified nucleotide sequence according to SEQ ID NO: 263;
[1687] (ttt) the sense strand comprises a modified nucleotide sequence according to SEQ ID NO: 360 and the antisense strand comprises a modified nucleotide sequence according to SEQ ID NO: 264;
[1688] (uuu) the sense strand comprises a modified nucleotide sequence according to SEQ ID NO: 361 and the antisense strand comprises a modified nucleotide sequence according to SEQ ID NO: 265;
[1689] (vvv) the sense strand comprises a modified nucleotide sequence according to SEQ ID NO: 362 and the antisense strand comprises a modified nucleotide sequence according to SEQ ID NO: 266;
[1690] (www) the sense strand comprises a modified nucleotide sequence according to SEQ ID NO: 363 and the antisense strand comprises a modified nucleotide sequence according to SEQ ID NO: 267;
[1691] (xxx) the sense strand comprises a modified nucleotide sequence according to SEQ ID NO: 364 and the antisense strand comprises a modified nucleotide sequence according to SEQ ID NO: 268;
[1692] (yyy) the sense strand comprises a modified nucleotide sequence according to SEQ ID NO: 365 and the antisense strand comprises a modified nucleotide sequence according to SEQ ID NO: 269;
[1693] (zzz) the sense strand comprises a modified nucleotide sequence according to SEQ ID NO: 366 and the antisense strand comprises a modified nucleotide sequence according to SEQ ID NO: 270;
[1694] (aaaa) the sense strand comprises a modified nucleotide sequence according to SEQ ID NO: 367 and the antisense strand comprises a modified nucleotide sequence according to SEQ ID NO: 271;
[1695] (bbbb) the sense strand comprises a modified nucleotide sequence according to SEQ ID NO: 368 and the antisense strand comprises a modified nucleotide sequence according to SEQ ID NO: 272;
[1696] (cccc) the sense strand comprises a modified nucleotide sequence according to SEQ ID NO: 369 and the antisense strand comprises a modified nucleotide sequence according to SEQ ID NO: 273;
[1697] (dddd) the sense strand comprises a modified nucleotide sequence according to SEQ ID NO: 370 and the antisense strand comprises a modified nucleotide sequence according to SEQ ID NO: 274;
[1698] (eeee) the sense strand comprises a modified nucleotide sequence according to SEQ ID NO: 371 and the antisense strand comprises a modified nucleotide sequence according to SEQ ID NO: 275;
[1699] (ffff) the sense strand comprises a modified nucleotide sequence according to SEQ ID NO: 372 and the antisense strand comprises a modified nucleotide sequence according to SEQ ID NO: 276;
[1700] (gggg) the sense strand comprises a modified nucleotide sequence according to SEQ ID NO: 373 and the antisense strand comprises a modified nucleotide sequence according to SEQ ID NO: 277;
[1701] (hhhh) the sense strand comprises a modified nucleotide sequence according to SEQ ID NO: 374 and the antisense strand comprises a modified nucleotide sequence according to SEQ ID NO: 278;
[1702] (iiii) the sense strand comprises a modified nucleotide sequence according to SEQ ID NO: 375 and the antisense strand comprises a modified nucleotide sequence according to SEQ ID NO: 279;
[1703] (jjjj) the sense strand comprises a modified nucleotide sequence according to SEQ ID NO: 376 and the antisense strand comprises a modified nucleotide sequence according to SEQ ID NO: 280;
[1704] (kkkk) the sense strand comprises a modified nucleotide sequence according to SEQ ID NO: 377 and the antisense strand comprises a modified nucleotide sequence according to SEQ ID NO: 281;
[1705] (llll) the sense strand comprises a modified nucleotide sequence according to SEQ ID NO: 378 and the antisense strand comprises a modified nucleotide sequence according to SEQ ID NO: 282;
[1706] (mmmm) the sense strand comprises a modified nucleotide sequence according to SEQ ID NO: 379 and the antisense strand comprises a modified nucleotide sequence according to SEQ ID NO: 283;
[1707] (nnnn) the sense strand comprises a modified nucleotide sequence according to SEQ ID NO: 380 and the antisense strand comprises a modified nucleotide sequence according to SEQ ID NO: 284;
[1708] (oooo) the sense strand comprises a modified nucleotide sequence according to SEQ ID NO: 381 and the antisense strand comprises a modified nucleotide sequence according to SEQ ID NO: 285;
[1709] (pppp) the sense strand comprises a modified nucleotide sequence according to SEQ ID NO: 382 and the antisense strand comprises a modified nucleotide sequence according to SEQ ID NO: 286;
[1710] (qqqq) the sense strand comprises a modified nucleotide sequence according to SEQ ID NO: 383 and the antisense strand comprises a modified nucleotide sequence according to SEQ ID NO: 287;
[1711] (rrrr) the sense strand comprises a modified nucleotide sequence according to SEQ ID NO: 384 and the antisense strand comprises a modified nucleotide sequence according to SEQ ID NO: 288;
[1712] (ssss) the sense strand comprises a modified nucleotide sequence according to SEQ ID NO: 385 and the antisense strand comprises a modified nucleotide sequence according to SEQ ID NO: 193;
[1713] (tttt) the sense strand comprises a modified nucleotide sequence according to SEQ ID NO: 386 and the antisense strand comprises a modified nucleotide sequence according to SEQ ID NO: 194;
[1714] (uuuu) the sense strand comprises a modified nucleotide sequence according to SEQ ID NO: 387 and the antisense strand comprises a modified nucleotide sequence according to SEQ ID NO: 195;
[1715] (vvvv) the sense strand comprises a modified nucleotide sequence according to SEQ ID NO: 388 and the antisense strand comprises a modified nucleotide sequence according to SEQ ID NO: 196;
[1716] (wwww) the sense strand comprises a modified nucleotide sequence according to SEQ ID NO: 389 and the antisense strand comprises a modified nucleotide sequence according to SEQ ID NO: 197;
[1717] (xxxx) the sense strand comprises a modified nucleotide sequence according to SEQ ID NO: 390 and the antisense strand comprises a modified nucleotide sequence according to SEQ ID NO: 198;
[1718] (yyyy) the sense strand comprises a modified nucleotide sequence according to SEQ ID NO: 391 and the antisense strand comprises a modified nucleotide sequence according to SEQ ID NO: 199;
[1719] (zzzz) the sense strand comprises a modified nucleotide sequence according to SEQ ID NO: 392 and the antisense strand comprises a modified nucleotide sequence according to SEQ ID NO: 200;
[1720] (aaaaa) the sense strand comprises a modified nucleotide sequence according to SEQ ID NO: 393 and the antisense strand comprises a modified nucleotide sequence according to SEQ ID NO: 201;
[1721] (bbbbb) the sense strand comprises a modified nucleotide sequence according to SEQ ID NO: 394 and the antisense strand comprises a modified nucleotide sequence according to SEQ ID NO: 202;
[1722] (ccccc) the sense strand comprises a modified nucleotide sequence according to SEQ ID NO: 395 and the antisense strand comprises a modified nucleotide sequence according to SEQ ID NO: 203;
[1723] (ddddd) the sense strand comprises a modified nucleotide sequence according to SEQ ID NO: 396 and the antisense strand comprises a modified nucleotide sequence according to SEQ ID NO: 204;
[1724] (eeeee) the sense strand comprises a modified nucleotide sequence according to SEQ ID NO: 397 and the antisense strand comprises a modified nucleotide sequence according to SEQ ID NO: 205;
[1725] (fffff) the sense strand comprises a modified nucleotide sequence according to SEQ ID NO: 398 and the antisense strand comprises a modified nucleotide sequence according to SEQ ID NO: 206;
[1726] (ggggg) the sense strand comprises a modified nucleotide sequence according to SEQ ID NO: 399 and the antisense strand comprises a modified nucleotide sequence according to SEQ ID NO: 207;
[1727] (hhhhh) the sense strand comprises a modified nucleotide sequence according to SEQ ID NO: 400 and the antisense strand comprises a modified nucleotide sequence according to SEQ ID NO: 208;
[1728] (iiiii) the sense strand comprises a modified nucleotide sequence according to SEQ ID NO: 401 and the antisense strand comprises a modified nucleotide sequence according to SEQ ID NO: 209;
[1729] (jjjjj) the sense strand comprises a modified nucleotide sequence according to SEQ ID NO: 402 and the antisense strand comprises a modified nucleotide sequence according to SEQ ID NO: 210;
[1730] (kkkkk) the sense strand comprises a modified nucleotide sequence according to SEQ ID NO: 403 and the antisense strand comprises a modified nucleotide sequence according to SEQ ID NO: 211;
[1731] (lllll) the sense strand comprises a modified nucleotide sequence according to SEQ ID NO: 404 and the antisense strand comprises a modified nucleotide sequence according to SEQ ID NO: 212;
[1732] (mmmmm) the sense strand comprises a modified nucleotide sequence according to SEQ ID NO: 405 and the antisense strand comprises a modified nucleotide sequence according to SEQ ID NO: 213;
[1733] (nnnnn) the sense strand comprises a modified nucleotide sequence according to SEQ ID NO: 406 and the antisense strand comprises a modified nucleotide sequence according to SEQ ID NO: 214;
[1734] (ooooo) the sense strand comprises a modified nucleotide sequence according to SEQ ID NO: 407 and the antisense strand comprises a modified nucleotide sequence according to SEQ ID NO: 215;
[1735] (ppppp) the sense strand comprises a modified nucleotide sequence according to SEQ ID NO: 408 and the antisense strand comprises a modified nucleotide sequence according to SEQ ID NO: 216;
[1736] (qqqqq) the sense strand comprises a modified nucleotide sequence according to SEQ ID NO: 409 and the antisense strand comprises a modified nucleotide sequence according to SEQ ID NO: 217;
[1737] (rrrrr) the sense strand comprises a modified nucleotide sequence according to SEQ ID NO: 410 and the antisense strand comprises a modified nucleotide sequence according to SEQ ID NO: 218;
[1738] (sssss) the sense strand comprises a modified nucleotide sequence according to SEQ ID NO: 411 and the antisense strand comprises a modified nucleotide sequence according to SEQ ID NO: 219;
[1739] (ttttt) the sense strand comprises a modified nucleotide sequence according to SEQ ID NO: 412 and the antisense strand comprises a modified nucleotide sequence according to SEQ ID NO: 220;
[1740] (uuuuu) the sense strand comprises a modified nucleotide sequence according to SEQ ID NO: 413 and the antisense strand comprises a modified nucleotide sequence according to SEQ ID NO: 221;
[1741] (vvvvv) the sense strand comprises a modified nucleotide sequence according to SEQ ID NO: 414 and the antisense strand comprises a modified nucleotide sequence according to SEQ ID NO: 222;
[1742] (wwwww) the sense strand comprises a modified nucleotide sequence according to SEQ ID NO: 415 and the antisense strand comprises a modified nucleotide sequence according to SEQ ID NO: 223;
[1743] (xxxxx) the sense strand comprises a modified nucleotide sequence according to SEQ ID NO: 416 and the antisense strand comprises a modified nucleotide sequence according to SEQ ID NO: 224;
[1744] (yyyyy) the sense strand comprises a modified nucleotide sequence according to SEQ ID NO: 417 and the antisense strand comprises a modified nucleotide sequence according to SEQ ID NO: 225;
[1745] (zzzzz) the sense strand comprises a modified nucleotide sequence according to SEQ ID NO: 418 and the antisense strand comprises a modified nucleotide sequence according to SEQ ID NO: 226;
[1746] (aaaaaa) the sense strand comprises a modified nucleotide sequence according to SEQ ID NO: 419 and the antisense strand comprises a modified nucleotide sequence according to SEQ ID NO: 227;
[1747] (bbbbbb) the sense strand comprises a modified nucleotide sequence according to SEQ ID NO: 420 and the antisense strand comprises a modified nucleotide sequence according to SEQ ID NO: 228;
[1748] (cccccc) the sense strand comprises a modified nucleotide sequence according to SEQ ID NO: 421 and the antisense strand comprises a modified nucleotide sequence according to SEQ ID NO: 229;
[1749] (dddddd) the sense strand comprises a modified nucleotide sequence according to SEQ ID NO: 422 and the antisense strand comprises a modified nucleotide sequence according to SEQ ID NO: 230;
[1750] (eeeeee) the sense strand comprises a modified nucleotide sequence according to SEQ ID NO: 423 and the antisense strand comprises a modified nucleotide sequence according to SEQ ID NO: 231;
[1751] (ffffff) the sense strand comprises a modified nucleotide sequence according to SEQ ID NO: 424 and the antisense strand comprises a modified nucleotide sequence according to SEQ ID NO: 232;
[1752] (gggggg) the sense strand comprises a modified nucleotide sequence according to SEQ ID NO: 425 and the antisense strand comprises a modified nucleotide sequence according to SEQ ID NO: 233;
[1753] (hhhhhh) the sense strand comprises a modified nucleotide sequence according to SEQ ID NO: 426 and the antisense strand comprises a modified nucleotide sequence according to SEQ ID NO: 234;
[1754] (iiiiii) the sense strand comprises a modified nucleotide sequence according to SEQ ID NO: 427 and the antisense strand comprises a modified nucleotide sequence according to SEQ ID NO: 235;
[1755] (jjjjjj) the sense strand comprises a modified nucleotide sequence according to SEQ ID NO: 428 and the antisense strand comprises a modified nucleotide sequence according to SEQ ID NO: 236;
[1756] (kkkkkk) the sense strand comprises a modified nucleotide sequence according to SEQ ID NO: 429 and the antisense strand comprises a modified nucleotide sequence according to SEQ ID NO: 237;
[1757] (llllll) the sense strand comprises a modified nucleotide sequence according to SEQ ID NO: 430 and the antisense strand comprises a modified nucleotide sequence according to SEQ ID NO: 238;
[1758] (mmmmmm) the sense strand comprises a modified nucleotide sequence according to SEQ ID NO: 431 and the antisense strand comprises a modified nucleotide sequence according to SEQ ID NO: 239;
[1759] (nnnnnn) the sense strand comprises a modified nucleotide sequence according to SEQ ID NO: 432 and the antisense strand comprises a modified nucleotide sequence according to SEQ ID NO: 240;
[1760] (oooooo) the sense strand comprises a modified nucleotide sequence according to SEQ ID NO: 433 and the antisense strand comprises a modified nucleotide sequence according to SEQ ID NO: 241;
[1761] (pppppp) the sense strand comprises a modified nucleotide sequence according to SEQ ID NO: 434 and the antisense strand comprises a modified nucleotide sequence according to SEQ ID NO: 242;
[1762] (qqqqqq) the sense strand comprises a modified nucleotide sequence according to SEQ ID NO: 435 and the antisense strand comprises a modified nucleotide sequence according to SEQ ID NO: 243;
[1763] (rrrrrr) the sense strand comprises a modified nucleotide sequence according to SEQ ID NO: 436 and the antisense strand comprises a modified nucleotide sequence according to SEQ ID NO: 244;
[1764] (ssssss) the sense strand comprises a modified nucleotide sequence according to SEQ ID NO: 437 and the antisense strand comprises a modified nucleotide sequence according to SEQ ID NO: 245;
[1765] (tttttt) the sense strand comprises a modified nucleotide sequence according to SEQ ID NO: 438 and the antisense strand comprises a modified nucleotide sequence according to SEQ ID NO: 246;
[1766] (uuuuuu) the sense strand comprises a modified nucleotide sequence according to SEQ ID NO: 439 and the antisense strand comprises a modified nucleotide sequence according to SEQ ID NO: 247;
[1767] (vvvvvv) the sense strand comprises a modified nucleotide sequence according to SEQ ID NO: 440 and the antisense strand comprises a modified nucleotide sequence according to SEQ ID NO: 248;
[1768] (wwwwww) the sense strand comprises a modified nucleotide sequence according to SEQ ID NO: 441 and the antisense strand comprises a modified nucleotide sequence according to SEQ ID NO: 249;
[1769] (xxxxxx) the sense strand comprises a modified nucleotide sequence according to SEQ ID NO: 442 and the antisense strand comprises a modified nucleotide sequence according to SEQ ID NO: 250;
[1770] (yyyyyy) the sense strand comprises a modified nucleotide sequence according to SEQ ID NO: 443 and the antisense strand comprises a modified nucleotide sequence according to SEQ ID NO: 251;
[1771] (zzzzzz) the sense strand comprises a modified nucleotide sequence according to SEQ ID NO: 444 and the antisense strand comprises a modified nucleotide sequence according to SEQ ID NO: 252;
[1772] (aaaaaaa) the sense strand comprises a modified nucleotide sequence according to SEQ ID NO: 445 and the antisense strand comprises a modified nucleotide sequence according to SEQ ID NO: 253;
[1773] (bbbbbbb) the sense strand comprises a modified nucleotide sequence according to SEQ ID NO: 446 and the antisense strand comprises a modified nucleotide sequence according to SEQ ID NO: 254;
[1774] (ccccccc) the sense strand comprises a modified nucleotide sequence according to SEQ ID NO: 447 and the antisense strand comprises a modified nucleotide sequence according to SEQ ID NO: 255;
[1775] (ddddddd) the sense strand comprises a modified nucleotide sequence according to SEQ ID NO: 448 and the antisense strand comprises a modified nucleotide sequence according to SEQ ID NO: 256;
[1776] (eeeeeee) the sense strand comprises a modified nucleotide sequence according to SEQ ID NO: 449 and the antisense strand comprises a modified nucleotide sequence according to SEQ ID NO: 257;
[1777] (fffffff) the sense strand comprises a modified nucleotide sequence according to SEQ ID NO: 450 and the antisense strand comprises a modified nucleotide sequence according to SEQ ID NO: 258;
[1778] (ggggggg) the sense strand comprises a modified nucleotide sequence according to SEQ ID NO: 451 and the antisense strand comprises a modified nucleotide sequence according to SEQ ID NO: 259;
[1779] (hhhhhhh) the sense strand comprises a modified nucleotide sequence according to SEQ ID NO: 452 and the antisense strand comprises a modified nucleotide sequence according to SEQ ID NO: 260;
[1780] (iiiiii) the sense strand comprises a modified nucleotide sequence according to SEQ ID NO: 453 and the antisense strand comprises a modified nucleotide sequence according to SEQ ID NO: 261;
[1781] (jjjjjjj) the sense strand comprises a modified nucleotide sequence according to SEQ ID NO: 454 and the antisense strand comprises a modified nucleotide sequence according to SEQ ID NO: 262;
[1782] (kkkkkkk) the sense strand comprises a modified nucleotide sequence according to SEQ ID NO: 455 and the antisense strand comprises a modified nucleotide sequence according to SEQ ID NO: 263;
[1783] (lllllll) the sense strand comprises a modified nucleotide sequence according to SEQ ID NO: 456 and the antisense strand comprises a modified nucleotide sequence according to SEQ ID NO: 264;
[1784] (mmmmmmm) the sense strand comprises a modified nucleotide sequence according to SEQ ID NO: 457 and the antisense strand comprises a modified nucleotide sequence according to SEQ ID NO: 265;
[1785] (nnnnnnn) the sense strand comprises a modified nucleotide sequence according to SEQ ID NO: 458 and the antisense strand comprises a modified nucleotide sequence according to SEQ ID NO: 266;
[1786] (ooooooo) the sense strand comprises a modified nucleotide sequence according to SEQ ID NO: 459 and the antisense strand comprises a modified nucleotide sequence according to SEQ ID NO: 267;
[1787] (ppppppp) the sense strand comprises a modified nucleotide sequence according to SEQ ID NO: 460 and the antisense strand comprises a modified nucleotide sequence according to SEQ ID NO: 268;
[1788] (qqqqqqq) the sense strand comprises a modified nucleotide sequence according to SEQ ID NO: 461 and the antisense strand comprises a modified nucleotide sequence according to SEQ ID NO: 269;
[1789] (rrrrrrrr) the sense strand comprises a modified nucleotide sequence according to SEQ ID NO: 462 and the antisense strand comprises a modified nucleotide sequence according to SEQ ID NO: 270;
[1790] (sssssss) the sense strand comprises a modified nucleotide sequence according to SEQ ID NO: 463 and the antisense strand comprises a modified nucleotide sequence according to SEQ ID NO: 271;
[1791] (ttttttt) the sense strand comprises a modified nucleotide sequence according to SEQ ID NO: 464 and the antisense strand comprises a modified nucleotide sequence according to SEQ ID NO: 272;
[1792] (uuuuuuu) the sense strand comprises a modified nucleotide sequence according to SEQ ID NO: 465 and the antisense strand comprises a modified nucleotide sequence according to SEQ ID NO: 273;
[1793] (vvvvvvv) the sense strand comprises a modified nucleotide sequence according to SEQ ID NO: 466 and the antisense strand comprises a modified nucleotide sequence according to SEQ ID NO: 274;
[1794] (wwwwwww) the sense strand comprises a modified nucleotide sequence according to SEQ ID NO: 467 and the antisense strand comprises a modified nucleotide sequence according to SEQ ID NO: 275;
[1795] (xxxxxxx) the sense strand comprises a modified nucleotide sequence according to SEQ ID NO: 468 and the antisense strand comprises a modified nucleotide sequence according to SEQ ID NO: 276;
[1796] (yyyyyyy) the sense strand comprises a modified nucleotide sequence according to SEQ ID NO: 469 and the antisense strand comprises a modified nucleotide sequence according to SEQ ID NO: 277;
[1797] (zzzzzzz) the sense strand comprises a modified nucleotide sequence according to SEQ ID NO: 470 and the antisense strand comprises a modified nucleotide sequence according to SEQ ID NO: 278;
[1798] (aaaaaaaa) the sense strand comprises a modified nucleotide sequence according to SEQ ID NO: 471 and the antisense strand comprises a modified nucleotide sequence according to SEQ ID NO: 279;
[1799] (bbbbbbbb) the sense strand comprises a modified nucleotide sequence according to SEQ ID NO: 472 and the antisense strand comprises a modified nucleotide sequence according to SEQ ID NO: 280;
[1800] (cccccccc) the sense strand comprises a modified nucleotide sequence according to SEQ ID NO: 473 and the antisense strand comprises a modified nucleotide sequence according to SEQ ID NO: 281;
[1801] (dddddddd) the sense strand comprises a modified nucleotide sequence according to SEQ ID NO: 474 and the antisense strand comprises a modified nucleotide sequence according to SEQ ID NO: 282;
[1802] (eeeeeeee) the sense strand comprises a modified nucleotide sequence according to SEQ ID NO: 475 and the antisense strand comprises a modified nucleotide sequence according to SEQ ID NO: 283;
[1803] (ffffffff) the sense strand comprises a modified nucleotide sequence according to SEQ ID NO: 476 and the antisense strand comprises a modified nucleotide sequence according to SEQ ID NO: 284;
[1804] (gggggggg) the sense strand comprises a modified nucleotide sequence according to SEQ ID NO: 477 and the antisense strand comprises a modified nucleotide sequence according to SEQ ID NO: 285;
[1805] (hhhhhhhh) the sense strand comprises a modified nucleotide sequence according to SEQ ID NO: 478 and the antisense strand comprises a modified nucleotide sequence according to SEQ ID NO: 286;
[1806] (iiiiiii) the sense strand comprises a modified nucleotide sequence according to SEQ ID NO: 479 and the antisense strand comprises a modified nucleotide sequence according to SEQ ID NO: 287; or
[1807] (jjjjjjjj) the sense strand comprises a modified nucleotide sequence according to SEQ ID NO: 480 and the antisense strand comprises a modified nucleotide sequence according to SEQ ID NO: 288.

[1808] Embodiment 55. The RNAi agent of embodiment 54, wherein:
[1809] (a) the sense strand comprises a modified nucleotide sequence according to SEQ ID NO: 400 and the antisense strand comprises a modified nucleotide sequence according to SEQ ID NO: 208;
[1810] (b) the sense strand comprises a modified nucleotide sequence according to SEQ ID NO: 419 and the antisense strand comprises a modified nucleotide sequence according to SEQ ID NO: 227;
[1811] (c) the sense strand comprises a modified nucleotide sequence according to SEQ ID NO: 436 and the antisense strand comprises a modified nucleotide sequence according to SEQ ID NO: 244;
[1812] (d) the sense strand comprises a modified nucleotide sequence according to SEQ ID NO: 468 and the antisense strand comprises a modified nucleotide sequence according to SEQ ID NO: 276;
[1813] (e) the sense strand comprises a modified nucleotide sequence according to SEQ ID NO: 470 and the antisense strand comprises a modified nucleotide sequence according to SEQ ID NO: 278;
[1814] (f) the sense strand comprises a modified nucleotide sequence according to SEQ ID NO: 473 and the antisense strand comprises a modified nucleotide sequence according to SEQ ID NO: 281; or
[1815] (g) the sense strand comprises a modified nucleotide sequence according to SEQ ID NO: 474 and the antisense strand comprises a modified nucleotide sequence according to SEQ ID NO: 282.

[1816] Embodiment 56. The RNAi agent of embodiment 55, wherein the RNAi agent comprises a targeting ligand comprising a structure according to Formula I:

[chemical structure]

[1817] wherein R is a linker conjugated to the wherein the targeting ligand is conjugated to the 3′ end of the sense strand, wherein R comprises a structure according to Formula III:

[chemical structure]

[1818] and wherein connection point C of Formula III is conjugated to Formula I, and connection point D of Formula III is conjugated to the 3′ end of the sense strand;
[1819] or wherein the RNAi agent comprises a targeting ligand comprising a structure according to Formula V:

[chemical structure]

[1820] Embodiment 57. The RNAi agent of any one of embodiments 1-53, wherein the sense strand comprises a 3′ overhang of 1-5 nucleotides in length.

[1821] Embodiment 58. The RNAi agent of any one of embodiments 1-53 and 57, wherein the sense strand comprises a 5′ overhang of 1-5 nucleotides in length.

[1822] Embodiment 59. The RNAi agent of any one of embodiments 1-53, wherein the antisense strand comprises a 3′ overhang of 1-5 nucleotides in length.

[1823] Embodiment 60. The RNAi agent of any one of embodiments 1-53 and 59, wherein the antisense strand comprises a 5′ overhang of 1-5 nucleotides in length.

[1824] Embodiment 61. The RNAi agent of any one of embodiments 1-60, wherein the sense strand or the antisense strand comprises at least one modified nucleotide or at least one modified internucleoside linkage.

[1825] Embodiment 62. The RNAi agent of embodiment 61, wherein the sense strand and or the antisense strand comprises a modified internucleoside linkage at a first, second, penultimate, or final internucleoside linkage position.

[1826] Embodiment 63. The RNAi agent of embodiment 61 or 62, wherein the at least one modified nucleotide or at least one modified internucleoside linkage comprises a 2′-O-methyl modified nucleotide, a nucleotide comprising a 5′-phosphorothioate group, a 2′-deoxy-2′-fluoro modified nucleotide, a 2′-deoxy-modified nucleotide, a locked nucleotide, an abasic nucleotide, deoxythymidine, an inverted deoxythymidine, a 2′-amino-modified nucleotide, a 2′-alkyl-modified nucleotide, a morpholino nucleotide, a phosphoramidate, or a non-natural base comprising nucleotide.

[1827] Embodiment 64. The RNAi agent of any one of embodiments 1-55 and 57-63, wherein the targeting ligand is conjugated to the sense strand.

[1828] Embodiment 65. The RNAi agent of embodiment 64, wherein the targeting ligand is conjugated to the 3′ end of the sense strand.

[1829] Embodiment 66. The RNAi agent of embodiment 64, wherein the targeting ligand is conjugated to the 5′ end of the sense strand.

[1830] Embodiment 67. The RNAi agent of any one of embodiments 1-55 and 57-63, wherein the targeting ligand is conjugated to the antisense strand.

[1831] Embodiment 68. The RNAi agent of embodiment 67, wherein the targeting ligand is conjugated to the 3′ end of the antisense strand.

[1832] Embodiment 69. The RNAi agent of embodiment 67, wherein the targeting ligand is conjugated to the 5′ end of the antisense strand.

[1833] Embodiment 70. The RNAi agent of any one of embodiments 1-55 and 57-69, wherein the targeting ligand comprises a galactose trimer.

[1834] Embodiment 71. The RNAi agent of any one of embodiments 1-55 and 57-70, wherein the targeting ligand comprises N-acetylgalactosamine (GalNAc).

[1835] Embodiment 72. The RNAi agent of any one of embodiments 1-55 and 57-71, wherein the targeting ligand comprises a structure according to Formula I:

[chemical structure]

wherein R is:
[1836] (i) the sense strand or the antisense strand; or
[1837] (ii) a linker conjugated to the sense strand or the antisense strand.

[1838] Embodiment 73. The RNAi agent of embodiment 72, wherein R is a linker conjugated to the sense strand or the antisense strand having a structure according to Formula III:

[chemical structure]

wherein:
[1839] (i) connection point C of Formula III is conjugated to Formula I, and connection point D of Formula III is conjugated to the sense strand or the antisense strand; or
[1840] (ii) connection point C of Formula III is conjugated to Formula I, and connection point D of Formula III is conjugated to a phosphate group which is conjugated to the sense strand or the antisense strand.

[1841] Embodiment 74. The RNAi agent of any one of embodiments 1-55 and 56-71, wherein the RNAi agent comprises a targeting ligand and linker according to Formula V:

[chemical structure]

[1842] Embodiment 75. The RNAi agent of any one of claims 72-74, wherein Formula III or the phosphate group is conjugated to the 3′ end or the 5′ end of the sense strand or the antisense strand.

[1843] Embodiment 76. The RNAi agent of any one of claims 72-74, wherein Formula III or the phosphate group is conjugated to an internal nucleotide or nucleoside base of the sense strand or the antisense strand.

[1844] Embodiment 77. The RNAi agent of any one of embodiments 1-76, wherein the RNAi agent is an siRNA molecule.

[1845] Embodiment 78. The RNAi agent of any one of embodiments 1-76, wherein the RNAi agent is an shRNA molecule.

[1846] Embodiment 79. A modified oligonucleotide consisting of 12 to 30 or 12 to 50 linked nucleosides, wherein the modified oligonucleotide has a nucleobase sequence comprising at least 12, at least 13, at least 14, at least 15, at least 16, at least 17, at least 18, at least 19, at least 20, at least 21, at least 22, at least 23, at least 24, or at least 25 contiguous nucleobases complementary to an equal length portion of SEQ ID NO: 481, and wherein the modified oligonucleotide comprises at least one synthetically modified internucleoside linkage or at least one synthetically modified sugar-phosphate backbone.

[1847] Embodiment 80. The modified oligonucleotide of embodiment 79, wherein the modified oligonucleotide comprises a synthetically modified internucleoside linkage at a first, second, penultimate, or final internucleoside linkage position.

[1848] Embodiment 81. The modified oligonucleotide of embodiment 79 or 80, wherein the modified oligonucleotide comprises a 2′-O-methyl modified nucleotide, a nucleotide comprising a 5′-phosphorothioate group, a 2′-deoxy-2′-fluoro modified nucleotide, a 2′-deoxy-modified nucleotide, a locked nucleotide, an abasic nucleotide, deoxythymidine, an inverted deoxythymidine, a 2′-amino-modified nucleotide, a 2′-alkyl-modified nucleotide, a morpholino nucleotide, a phosphoramidate, or a non-natural base comprising nucleotide.

[1849] Embodiment 82. The modified oligonucleotide of any one of embodiments 79-81, wherein the modified oligonucleotide or a subsequence thereof differs by 0, 1, 2, 3, or 4 nucleotides from an equal length portion of any one of SEQ ID NOS: 193-288, wherein the subsequence is at least 14, 15, 16, 17, 18, 19, 20, 21, 22, or 23 bases in length.

[1850] Embodiment 83. The modified oligonucleotide of any one of embodiments 79-82, wherein the modified oligonucleotide comprises, in order, nucleotides 1-23 of any one of SEQ ID NOS: 193-288.

[1851] Embodiment 84. The modified oligonucleotide of any one of embodiments 79-83, wherein the modified oligonucleotide comprises a modified nucleotide sequence according to any one of SEQ ID NOS: 193-288.

[1852] Embodiment 85. The modified oligonucleotide of any one of embodiments 79-84, wherein the modified oligonucleotide is conjugated to a targeting ligand that targets a hepatocyte.

[1853] Embodiment 86. The modified oligonucleotide of embodiment 85, wherein the modified oligonucleotide is conjugated to the targeting ligand conjugated to its 3′ end.

[1854] Embodiment 87. The modified oligonucleotide of embodiment 85, wherein the modified oligonucleotide is conjugated to the targeting ligand conjugated to its 5′ end.

[1855] Embodiment 88. The modified oligonucleotide of any one of embodiments 85-87, wherein the targeting ligand comprises a galactose trimer.

[1856] Embodiment 89. The modified oligonucleotide of any one of embodiments 85-88, wherein the targeting ligand comprises N-acetylgalactosamine (GalNAc).

[1857] Embodiment 90. The modified oligonucleotide of any one of embodiments 85-89, wherein the targeting ligand comprises a structure according to Formula I:

[chemical structure]

wherein R is:
[1858] (i) the modified oligonucleotide; or
[1859] (ii) a linker conjugated to the modified oligonucleotide.

[1860] Embodiment 91. The modified oligonucleotide of embodiment 90, wherein R is a linker conjugated to the modified oligonucleotide having a structure according to Formula III:

[chemical structure]

wherein:
[1861] (i) connection point C of Formula III is conjugated to Formula I, and connection point D of Formula III is conjugated to the modified oligonucleotide; or
[1862] (ii) connection point C of Formula III is conjugated to Formula I, and connection point D of Formula III is conjugated to a phosphate group which is conjugated to the modified oligonucleotide.

[1863] Embodiment 92. The modified oligonucleotide of embodiment 91, wherein Formula III or the phosphate group is conjugated to the 3′ end or the 5′ end of the modified oligonucleotide.

[1864] Embodiment 93. The modified oligonucleotide of embodiment 91, wherein Formula III or the phosphate group is conjugated to an internal nucleotide or nucleoside base of the modified oligonucleotide.

[1865] Embodiment 94. The modified oligonucleotide of any one of embodiments 85-89, wherein the modified oligonucleotide comprises a targeting ligand and linker according to Formula V:

[chemical structure]

[1866] Embodiment 95. The modified oligonucleotide of any one of embodiments 79-94, wherein the modified oligonucleotide is an siRNA molecule.

[1867] Embodiment 96. The modified oligonucleotide of any one of embodiments 79-94, wherein the modified oligonucleotide is an shRNA molecule.

[1868] Embodiment 97. An oligomeric duplex comprising:
[1869] (a) a first modified oligonucleotide consisting of 12 to 30 or 12 to 50 linked nucleosides, wherein a nucleobase sequence of the first modified oligonucleotide comprises at least 12, at least 13, at least 14, at least 15, at least 16, at least 17, at least 18, at least 19, at least 20, at least 21, at least 22, at least 23, at least 24, or at least 25 contiguous nucleobases that are at least 80%, 81%, 82%, 83%, 84%, 85%, 86%, 87%, 88%, 89%, 90%, 91%, 92%, 93%, 94%, 95%, 96%, 97%, 98%, 99%, or 100% complementary to an equal length portion of SEQ ID NO: 481; and
[1870] (b) a second modified oligonucleotide consisting of 12 to 30 or 12 to 50 linked nucleosides, wherein a nucleobase sequence of the second modified oligonucleotide comprises a complementary region of at least 8 nucleobases that is at least 90% complementary to the nucleobase sequence of an equal length portion of the first modified oligonucleotide.

[1871] Embodiment 98. The oligomeric duplex of embodiment 97, wherein the first modified oligonucleotide and/or second modified oligonucleotide comprises at least one synthetically modified internucleoside linkage or at least one synthetically modified sugar-phosphate backbone.

[1872] Embodiment 99. The oligomeric duplex of embodiment 97 or 98, wherein the first modified oligonucleotide and/or the second comprises a 2′-O-methyl modified nucleotide, a nucleotide comprising a 5′-phosphorothioate group, a 2′-deoxy-2′-fluoro modified nucleotide, a 2′-deoxy-modified nucleotide, a locked nucleotide, an abasic nucleotide, deoxythymidine, an inverted deoxythymidine, a 2′-amino-modified nucleotide, a 2′-alkyl-modified nucleotide, a morpholino nucleotide, a phosphoramidate, or a non-natural base comprising nucleotide.

[1873] Embodiment 100. The oligomeric duplex of any one of embodiments 97-99, wherein the first modified oligonucleotide or a subsequence thereof differs by 0, 1, 2, 3, or 4 nucleotides from an equal length portion of any one of SEQ ID NOS: 193-288, wherein the subsequence is at least 14, 15, 16, 17, 18, 19, 20, 21, 22, or 23 bases in length.

[1874] Embodiment 101. The oligomeric duplex of any one of embodiments 97-100, wherein the first modified oligonucleotide comprises, in order, nucleotides 1-23 of any one of SEQ ID NOS: 193-288.

[1875] Embodiment 102. The oligomeric duplex of any one of embodiments 97-100, wherein the first modified oligonucleotide comprises a modified nucleotide sequence according to any one of SEQ ID NOS: 193-288.

[1876] Embodiment 103. The oligomeric duplex of embodiment 102, wherein the first modified oligonucleotide comprises a modified nucleotide sequence according to any one of SEQ ID NOS: 200, 203, 206, 208, 227, 228, 230, 231, 233, 234, 244, 269, 276, 278, 279, 280, 281, 282, and 285.

[1877] Embodiment 104. The oligomeric duplex of any one of embodiments 97-103, wherein the second modified oligonucleotide or subsequence thereof differs by 0, 1, 2, 3, or 4 nucleotides from an equal length portion of any one of SEQ ID NOS: 289-384 and 385-480, wherein the subsequence is at least 14, 15, 16, 17, 18, 19, 20, or 21 bases in length.

[1878] Embodiment 105. The oligomeric duplex of any one of embodiments 97-104, wherein the second modified oligonucleotide comprises, in order, nucleotides 1-21 of any one of SEQ ID NOS: 289-384 and 385-480.

[1879] Embodiment 106. The oligomeric duplex of any one of embodiments 97-105, wherein the second modified oligonucleotide comprises a modified nucleotide sequence according to any one of SEQ ID NOS: 289-384 and 385-480.

[1880] Embodiment 107. The oligomeric duplex of embodiment 106, wherein the second modified oligonucleotide comprises a modified nucleotide sequence according to any one of SEQ ID NOS: 104, 107, 110, 112, 131, 132, 134, 135, 137, 138, 148, 173, 180, 182, 183, 184, 185, 186, 189, 296, 299, 302, 304, 323, 324, 326, 327, 329, 330, 340, 365, 372, 374, 375, 376, 377, 378, 381, 392, 395, 398, 400, 419, 420, 422, 423, 425 426, 436, 461, 468, 470, 471, 472, 473, 474, and 477.

[1881] Embodiment 108. The oligomeric duplex of any one of embodiments 97-107, wherein:
[1882] (a) the second modified oligonucleotide comprises a modified nucleotide sequence according to SEQ ID NO: 289 and the first modified oligonucleotide comprises a modified nucleotide sequence according to SEQ ID NO: 193;
[1883] (b) the second modified oligonucleotide comprises a modified nucleotide sequence according to SEQ ID NO: 290 and the first modified oligonucleotide comprises a modified nucleotide sequence according to SEQ ID NO: 194;
[1884] (c) the second modified oligonucleotide comprises a modified nucleotide sequence according to SEQ ID NO: 291 and the first modified oligonucleotide comprises a modified nucleotide sequence according to SEQ ID NO: 195;
[1885] (d) the second modified oligonucleotide comprises a modified nucleotide sequence according to SEQ ID NO: 292 and the first modified oligonucleotide comprises a modified nucleotide sequence according to SEQ ID NO: 196;
[1886] (e) the second modified oligonucleotide comprises a modified nucleotide sequence according to SEQ ID NO: 293 and the first modified oligonucleotide comprises a modified nucleotide sequence according to SEQ ID NO: 197;
[1887] (f) the second modified oligonucleotide comprises a modified nucleotide sequence according to SEQ ID NO: 294 and the first modified oligonucleotide comprises a modified nucleotide sequence according to SEQ ID NO: 198;
[1888] (g) the second modified oligonucleotide comprises a modified nucleotide sequence according to SEQ ID NO: 295 and the first modified oligonucleotide comprises a modified nucleotide sequence according to SEQ ID NO: 199;
[1889] (h) the second modified oligonucleotide comprises a modified nucleotide sequence according to SEQ ID NO: 296 and the first modified oligonucleotide comprises a modified nucleotide sequence according to SEQ ID NO: 200;
[1890] (i) the second modified oligonucleotide comprises a modified nucleotide sequence according to SEQ ID NO: 297 and the first modified oligonucleotide comprises a modified nucleotide sequence according to SEQ ID NO: 201;
[1891] (j) the second modified oligonucleotide comprises a modified nucleotide sequence according to SEQ ID NO: 298 and the first modified oligonucleotide comprises a modified nucleotide sequence according to SEQ ID NO: 202;
[1892] (k) the second modified oligonucleotide comprises a modified nucleotide sequence according to SEQ ID NO: 299 and the first modified oligonucleotide comprises a modified nucleotide sequence according to SEQ ID NO: 203;
[1893] (l) the second modified oligonucleotide comprises a modified nucleotide sequence according to SEQ ID NO: 300 and the first modified oligonucleotide comprises a modified nucleotide sequence according to SEQ ID NO: 204;
[1894] (m) the second modified oligonucleotide comprises a modified nucleotide sequence according to SEQ ID NO: 301 and the first modified oligonucleotide comprises a modified nucleotide sequence according to SEQ ID NO: 205;
[1895] (n) the second modified oligonucleotide comprises a modified nucleotide sequence according to SEQ ID NO: 302 and the first modified oligonucleotide comprises a modified nucleotide sequence according to SEQ ID NO: 206;
[1896] (o) the second modified oligonucleotide comprises a modified nucleotide sequence according to SEQ ID NO: 303 and the first modified oligonucleotide comprises a modified nucleotide sequence according to SEQ ID NO: 207;
[1897] (p) the second modified oligonucleotide comprises a modified nucleotide sequence according to SEQ ID NO: 304 and the first modified oligonucleotide comprises a modified nucleotide sequence according to SEQ ID NO: 208;
[1898] (q) the second modified oligonucleotide comprises a modified nucleotide sequence according to SEQ ID NO: 305 and the first modified oligonucleotide comprises a modified nucleotide sequence according to SEQ ID NO: 209;
[1899] (r) the second modified oligonucleotide comprises a modified nucleotide sequence according to SEQ ID NO: 306 and the first modified oligonucleotide comprises a modified nucleotide sequence according to SEQ ID NO: 210;
[1900] (s) the second modified oligonucleotide comprises a modified nucleotide sequence according to SEQ ID NO: 307 and the first modified oligonucleotide comprises a modified nucleotide sequence according to SEQ ID NO: 211;
[1901] (t) the second modified oligonucleotide comprises a modified nucleotide sequence according to SEQ ID NO: 308 and the first modified oligonucleotide comprises a modified nucleotide sequence according to SEQ ID NO: 212;
[1902] (u) the second modified oligonucleotide comprises a modified nucleotide sequence according to SEQ ID NO: 309 and the first modified oligonucleotide comprises a modified nucleotide sequence according to SEQ ID NO: 213;
[1903] (v) the second modified oligonucleotide comprises a modified nucleotide sequence according to SEQ ID NO: 310 and the first modified oligonucleotide comprises a modified nucleotide sequence according to SEQ ID NO: 214;
[1904] (w) the second modified oligonucleotide comprises a modified nucleotide sequence according to SEQ ID NO: 311 and the first modified oligonucleotide comprises a modified nucleotide sequence according to SEQ ID NO: 215;
[1905] (x) the second modified oligonucleotide comprises a modified nucleotide sequence according to SEQ ID NO: 312 and the first modified oligonucleotide comprises a modified nucleotide sequence according to SEQ ID NO: 216;
[1906] (y) the second modified oligonucleotide comprises a modified nucleotide sequence according to SEQ ID NO: 313 and the first modified oligonucleotide comprises a modified nucleotide sequence according to SEQ ID NO: 217;
[1907] (z) the second modified oligonucleotide comprises a modified nucleotide sequence according to SEQ ID NO: 314 and the first modified oligonucleotide comprises a modified nucleotide sequence according to SEQ ID NO: 218;
[1908] (aa) the second modified oligonucleotide comprises a modified nucleotide sequence according to SEQ ID NO: 315 and the first modified oligonucleotide comprises a modified nucleotide sequence according to SEQ ID NO: 219;
[1909] (bb) the second modified oligonucleotide comprises a modified nucleotide sequence according to SEQ ID NO: 316 and the first modified oligonucleotide comprises a modified nucleotide sequence according to SEQ ID NO: 220;
[1910] (cc) the second modified oligonucleotide comprises a modified nucleotide sequence according to SEQ ID NO: 317 and the first modified oligonucleotide comprises a modified nucleotide sequence according to SEQ ID NO: 221;
[1911] (dd) the second modified oligonucleotide comprises a modified nucleotide sequence according to SEQ ID NO: 318 and the first modified oligonucleotide comprises a modified nucleotide sequence according to SEQ ID NO: 222;
[1912] (ee) the second modified oligonucleotide comprises a modified nucleotide sequence according to SEQ ID NO: 319 and the first modified oligonucleotide comprises a modified nucleotide sequence according to SEQ ID NO: 223;
[1913] (ff) the second modified oligonucleotide comprises a modified nucleotide sequence according to SEQ ID NO: 320 and the first modified oligonucleotide comprises a modified nucleotide sequence according to SEQ ID NO: 224;
[1914] (gg) the second modified oligonucleotide comprises a modified nucleotide sequence according to SEQ ID NO: 321 and the first modified oligonucleotide comprises a modified nucleotide sequence according to SEQ ID NO: 225;
[1915] (hh) the second modified oligonucleotide comprises a modified nucleotide sequence according to SEQ ID NO: 322 and the first modified oligonucleotide comprises a modified nucleotide sequence according to SEQ ID NO: 226;
[1916] (ii) the second modified oligonucleotide comprises a modified nucleotide sequence according to SEQ ID NO: 323 and the first modified oligonucleotide comprises a modified nucleotide sequence according to SEQ ID NO: 227;
[1917] (jj) the second modified oligonucleotide comprises a modified nucleotide sequence according to SEQ ID NO: 324 and the first modified oligonucleotide comprises a modified nucleotide sequence according to SEQ ID NO: 228;
[1918] (kk) the second modified oligonucleotide comprises a modified nucleotide sequence according to SEQ ID NO: 325 and the first modified oligonucleotide comprises a modified nucleotide sequence according to SEQ ID NO: 229;
[1919] (ll) the second modified oligonucleotide comprises a modified nucleotide sequence according to SEQ ID NO: 326 and the first modified oligonucleotide comprises a modified nucleotide sequence according to SEQ ID NO: 230;
[1920] (mm) the second modified oligonucleotide comprises a modified nucleotide sequence according to SEQ ID NO: 327 and the first modified oligonucleotide comprises a modified nucleotide sequence according to SEQ ID NO: 231;
[1921] (nn) the second modified oligonucleotide comprises a modified nucleotide sequence according to SEQ ID NO: 328 and the first modified oligonucleotide comprises a modified nucleotide sequence according to SEQ ID NO: 232;
[1922] (oo) the second modified oligonucleotide comprises a modified nucleotide sequence according to SEQ ID NO: 329 and the first modified oligonucleotide comprises a modified nucleotide sequence according to SEQ ID NO: 233;
[1923] (pp) the second modified oligonucleotide comprises a modified nucleotide sequence according to SEQ ID NO: 330 and the first modified oligonucleotide comprises a modified nucleotide sequence according to SEQ ID NO: 234;
[1924] (qq) the second modified oligonucleotide comprises a modified nucleotide sequence according to SEQ ID NO: 331 and the first modified oligonucleotide comprises a modified nucleotide sequence according to SEQ ID NO: 235;
[1925] (rr) the second modified oligonucleotide comprises a modified nucleotide sequence according to SEQ ID NO: 332 and the first modified oligonucleotide comprises a modified nucleotide sequence according to SEQ ID NO: 236;
[1926] (ss) the second modified oligonucleotide comprises a modified nucleotide sequence according to SEQ ID NO: 333 and the first modified oligonucleotide comprises a modified nucleotide sequence according to SEQ ID NO: 237;
[1927] (tt) the second modified oligonucleotide comprises a modified nucleotide sequence according to SEQ ID NO: 334 and the first modified oligonucleotide comprises a modified nucleotide sequence according to SEQ ID NO: 238;
[1928] (uu) the second modified oligonucleotide comprises a modified nucleotide sequence according to SEQ ID NO: 335 and the first modified oligonucleotide comprises a modified nucleotide sequence according to SEQ ID NO: 239;
[1929] (vv) the second modified oligonucleotide comprises a modified nucleotide sequence according to SEQ ID NO: 336 and the first modified oligonucleotide comprises a modified nucleotide sequence according to SEQ ID NO: 240;
[1930] (ww) the second modified oligonucleotide comprises a modified nucleotide sequence according to SEQ ID NO: 337 and the first modified oligonucleotide comprises a modified nucleotide sequence according to SEQ ID NO: 241;
[1931] (xx) the second modified oligonucleotide comprises a modified nucleotide sequence according to SEQ ID NO: 338 and the first modified oligonucleotide comprises a modified nucleotide sequence according to SEQ ID NO: 242;
[1932] (yy) the second modified oligonucleotide comprises a modified nucleotide sequence according to SEQ ID NO: 339 and the first modified oligonucleotide comprises a modified nucleotide sequence according to SEQ ID NO: 243;
[1933] (zz) the second modified oligonucleotide comprises a modified nucleotide sequence according to SEQ ID NO: 340 and the first modified oligonucleotide comprises a modified nucleotide sequence according to SEQ ID NO: 244;
[1934] (aaa) the second modified oligonucleotide comprises a modified nucleotide sequence according to SEQ ID NO: 341 and the first modified oligonucleotide comprises a modified nucleotide sequence according to SEQ ID NO: 245;
[1935] (bbb) the second modified oligonucleotide comprises a modified nucleotide sequence according to SEQ ID NO: 342 and the first modified oligonucleotide comprises a modified nucleotide sequence according to SEQ ID NO: 246;
[1936] (ccc) the second modified oligonucleotide comprises a modified nucleotide sequence according to SEQ ID NO: 343 and the first modified oligonucleotide comprises a modified nucleotide sequence according to SEQ ID NO: 247;
[1937] (ddd) the second modified oligonucleotide comprises a modified nucleotide sequence according to SEQ ID NO: 344 and the first modified oligonucleotide comprises a modified nucleotide sequence according to SEQ ID NO: 248;
[1938] (eee) the second modified oligonucleotide comprises a modified nucleotide sequence according to SEQ ID NO: 345 and the first modified oligonucleotide comprises a modified nucleotide sequence according to SEQ ID NO: 249;
[1939] (fff) the second modified oligonucleotide comprises a modified nucleotide sequence according to SEQ ID NO: 346 and the first modified oligonucleotide comprises a modified nucleotide sequence according to SEQ ID NO: 250;
[1940] (ggg) the second modified oligonucleotide comprises a modified nucleotide sequence according to SEQ ID NO: 347 and the first modified oligonucleotide comprises a modified nucleotide sequence according to SEQ ID NO: 251;
[1941] (hhh) the second modified oligonucleotide comprises a modified nucleotide sequence according to SEQ ID NO: 348 and the first modified oligonucleotide comprises a modified nucleotide sequence according to SEQ ID NO: 252;
[1942] (iii) the second modified oligonucleotide comprises a modified nucleotide sequence according to SEQ ID NO: 349 and the first modified oligonucleotide comprises a modified nucleotide sequence according to SEQ ID NO: 253;
[1943] (jjj) the second modified oligonucleotide comprises a modified nucleotide sequence according to SEQ ID NO: 350 and the first modified oligonucleotide comprises a modified nucleotide sequence according to SEQ ID NO: 254;
[1944] (kkk) the second modified oligonucleotide comprises a modified nucleotide sequence according to SEQ ID NO: 351 and the first modified oligonucleotide comprises a modified nucleotide sequence according to SEQ ID NO: 255;
[1945] (lll) the second modified oligonucleotide comprises a modified nucleotide sequence according to SEQ ID NO: 352 and the first modified oligonucleotide comprises a modified nucleotide sequence according to SEQ ID NO: 256;
[1946] (mmm) the second modified oligonucleotide comprises a modified nucleotide sequence according to SEQ ID NO: 353 and the first modified oligonucleotide comprises a modified nucleotide sequence according to SEQ ID NO: 257;
[1947] (nnn) the second modified oligonucleotide comprises a modified nucleotide sequence according to SEQ ID NO: 354 and the first modified oligonucleotide comprises a modified nucleotide sequence according to SEQ ID NO: 258;
[1948] (ooo) the second modified oligonucleotide comprises a modified nucleotide sequence according to SEQ ID NO: 355 and the first modified oligonucleotide comprises a modified nucleotide sequence according to SEQ ID NO: 259;
[1949] (ppp) the second modified oligonucleotide comprises a modified nucleotide sequence according to SEQ ID NO: 356 and the first modified oligonucleotide comprises a modified nucleotide sequence according to SEQ ID NO: 260;
[1950] (qqq) the second modified oligonucleotide comprises a modified nucleotide sequence according to SEQ ID NO: 357 and the first modified oligonucleotide comprises a modified nucleotide sequence according to SEQ ID NO: 261;
[1951] (rrr) the second modified oligonucleotide comprises a modified nucleotide sequence according to SEQ ID NO: 358 and the first modified oligonucleotide comprises a modified nucleotide sequence according to SEQ ID NO: 262;
[1952] (sss) the second modified oligonucleotide comprises a modified nucleotide sequence according to SEQ ID NO: 359 and the first modified oligonucleotide comprises a modified nucleotide sequence according to SEQ ID NO: 263;
[1953] (ttt) the second modified oligonucleotide comprises a modified nucleotide sequence according to SEQ ID NO: 360 and the first modified oligonucleotide comprises a modified nucleotide sequence according to SEQ ID NO: 264;
[1954] (uuu) the second modified oligonucleotide comprises a modified nucleotide sequence according to SEQ ID NO: 361 and the first modified oligonucleotide comprises a modified nucleotide sequence according to SEQ ID NO: 265;
[1955] (vvv) the second modified oligonucleotide comprises a modified nucleotide sequence according to SEQ ID NO: 362 and the first modified oligonucleotide comprises a modified nucleotide sequence according to SEQ ID NO: 266;
[1956] (www) the second modified oligonucleotide comprises a modified nucleotide sequence according to SEQ ID NO: 363 and the first modified oligonucleotide comprises a modified nucleotide sequence according to SEQ ID NO: 267;
[1957] (xxx) the second modified oligonucleotide comprises a modified nucleotide sequence according to SEQ ID NO: 364 and the first modified oligonucleotide comprises a modified nucleotide sequence according to SEQ ID NO: 268;
[1958] (yyy) the second modified oligonucleotide comprises a modified nucleotide sequence according to SEQ ID NO: 365 and the first modified oligonucleotide comprises a modified nucleotide sequence according to SEQ ID NO: 269;
[1959] (zzz) the second modified oligonucleotide comprises a modified nucleotide sequence according to SEQ ID NO: 366 and the first modified oligonucleotide comprises a modified nucleotide sequence according to SEQ ID NO: 270;
[1960] (aaaa) the second modified oligonucleotide comprises a modified nucleotide sequence according to SEQ ID NO: 367 and the first modified oligonucleotide comprises a modified nucleotide sequence according to SEQ ID NO: 271;
[1961] (bbbb) the second modified oligonucleotide comprises a modified nucleotide sequence according to SEQ ID NO: 368 and the first modified oligonucleotide comprises a modified nucleotide sequence according to SEQ ID NO: 272;
[1962] (cccc) the second modified oligonucleotide comprises a modified nucleotide sequence according to SEQ ID NO: 369 and the first modified oligonucleotide comprises a modified nucleotide sequence according to SEQ ID NO: 273;
[1963] (dddd) the second modified oligonucleotide comprises a modified nucleotide sequence according to SEQ ID NO: 370 and the first modified oligonucleotide comprises a modified nucleotide sequence according to SEQ ID NO: 274;
[1964] (eeee) the second modified oligonucleotide comprises a modified nucleotide sequence according to SEQ ID NO: 371 and the first modified oligonucleotide comprises a modified nucleotide sequence according to SEQ ID NO: 275;
[1965] (ffff) the second modified oligonucleotide comprises a modified nucleotide sequence according to SEQ ID NO: 372 and the first modified oligonucleotide comprises a modified nucleotide sequence according to SEQ ID NO: 276;
[1966] (gggg) the second modified oligonucleotide comprises a modified nucleotide sequence according to SEQ ID NO: 373 and the first modified oligonucleotide comprises a modified nucleotide sequence according to SEQ ID NO: 277;
[1967] (hhhh) the second modified oligonucleotide comprises a modified nucleotide sequence according to SEQ ID NO: 374 and the first modified oligonucleotide comprises a modified nucleotide sequence according to SEQ ID NO: 278;
[1968] (iiii) the second modified oligonucleotide comprises a modified nucleotide sequence according to SEQ ID NO: 375 and the first modified oligonucleotide comprises a modified nucleotide sequence according to SEQ ID NO: 279;
[1969] (jjjj) the second modified oligonucleotide comprises a modified nucleotide sequence according to SEQ ID NO: 376 and the first modified oligonucleotide comprises a modified nucleotide sequence according to SEQ ID NO: 280;
[1970] (kkkk) the second modified oligonucleotide comprises a modified nucleotide sequence according to SEQ ID NO: 377 and the first modified oligonucleotide comprises a modified nucleotide sequence according to SEQ ID NO: 281;
[1971] (llll) the second modified oligonucleotide comprises a modified nucleotide sequence according to SEQ ID NO: 378 and the first modified oligonucleotide comprises a modified nucleotide sequence according to SEQ ID NO: 282;
[1972] (mmmm) the second modified oligonucleotide comprises a modified nucleotide sequence according to SEQ ID NO: 379 and the first modified oligonucleotide comprises a modified nucleotide sequence according to SEQ ID NO: 283;
[1973] (nnnn) the second modified oligonucleotide comprises a modified nucleotide sequence according to SEQ ID NO: 380 and the first modified oligonucleotide comprises a modified nucleotide sequence according to SEQ ID NO: 284;
[1974] (oooo) the second modified oligonucleotide comprises a modified nucleotide sequence according to SEQ ID NO: 381 and the first modified oligonucleotide comprises a modified nucleotide sequence according to SEQ ID NO: 285;
[1975] (pppp) the second modified oligonucleotide comprises a modified nucleotide sequence according to SEQ ID NO: 382 and the first modified oligonucleotide comprises a modified nucleotide sequence according to SEQ ID NO: 286;
[1976] (qqqq) the second modified oligonucleotide comprises a modified nucleotide sequence according to SEQ ID NO: 383 and the first modified oligonucleotide comprises a modified nucleotide sequence according to SEQ ID NO: 287;
[1977] (rrrr) the second modified oligonucleotide comprises a modified nucleotide sequence according to SEQ ID NO: 384 and the first modified oligonucleotide comprises a modified nucleotide sequence according to SEQ ID NO: 288
[1978] (ssss) the sense strand comprises a modified nucleotide sequence according to SEQ ID NO: 385 and the antisense strand comprises a modified nucleotide sequence according to SEQ ID NO: 193;
[1979] (tttt) the sense strand comprises a modified nucleotide sequence according to SEQ ID NO: 386 and the antisense strand comprises a modified nucleotide sequence according to SEQ ID NO: 194;
[1980] (uuuu) the sense strand comprises a modified nucleotide sequence according to SEQ ID NO: 387 and the antisense strand comprises a modified nucleotide sequence according to SEQ ID NO: 195;
[1981] (vvvv) the sense strand comprises a modified nucleotide sequence according to SEQ ID NO: 388 and the antisense strand comprises a modified nucleotide sequence according to SEQ ID NO: 196;
[1982] (wwww) the sense strand comprises a modified nucleotide sequence according to SEQ ID NO: 389 and the antisense strand comprises a modified nucleotide sequence according to SEQ ID NO: 197;
[1983] (xxxx) the sense strand comprises a modified nucleotide sequence according to SEQ ID NO: 390 and the antisense strand comprises a modified nucleotide sequence according to SEQ ID NO: 198;
[1984] (yyyy) the sense strand comprises a modified nucleotide sequence according to SEQ ID NO: 391 and the antisense strand comprises a modified nucleotide sequence according to SEQ ID NO: 199;
[1985] (zzzz) the sense strand comprises a modified nucleotide sequence according to SEQ ID NO: 392 and the antisense strand comprises a modified nucleotide sequence according to SEQ ID NO: 200;
[1986] (aaaaa) the sense strand comprises a modified nucleotide sequence according to SEQ ID NO: 393 and the antisense strand comprises a modified nucleotide sequence according to SEQ ID NO: 201;
[1987] (bbbbb) the sense strand comprises a modified nucleotide sequence according to SEQ ID NO: 394 and the antisense strand comprises a modified nucleotide sequence according to SEQ ID NO: 202;
[1988] (ccccc) the sense strand comprises a modified nucleotide sequence according to SEQ ID NO: 395 and the antisense strand comprises a modified nucleotide sequence according to SEQ ID NO: 203;
[1989] (ddddd) the sense strand comprises a modified nucleotide sequence according to SEQ ID NO: 396 and the antisense strand comprises a modified nucleotide sequence according to SEQ ID NO: 204;
[1990] (eeeee) the sense strand comprises a modified nucleotide sequence according to SEQ ID NO: 397 and the antisense strand comprises a modified nucleotide sequence according to SEQ ID NO: 205;
[1991] (fffff) the sense strand comprises a modified nucleotide sequence according to SEQ ID NO: 398 and the antisense strand comprises a modified nucleotide sequence according to SEQ ID NO: 206;
[1992] (ggggg) the sense strand comprises a modified nucleotide sequence according to SEQ ID NO: 399 and the antisense strand comprises a modified nucleotide sequence according to SEQ ID NO: 207;
[1993] (hhhhh) the sense strand comprises a modified nucleotide sequence according to SEQ ID NO: 400 and the antisense strand comprises a modified nucleotide sequence according to SEQ ID NO: 208;
[1994] (iiiii) the sense strand comprises a modified nucleotide sequence according to SEQ ID NO: 401 and the antisense strand comprises a modified nucleotide sequence according to SEQ ID NO: 209;
[1995] (jjjjj) the sense strand comprises a modified nucleotide sequence according to SEQ ID NO: 402 and the antisense strand comprises a modified nucleotide sequence according to SEQ ID NO: 210;
[1996] (kkkkk) the sense strand comprises a modified nucleotide sequence according to SEQ ID NO: 403 and the antisense strand comprises a modified nucleotide sequence according to SEQ ID NO: 211;
[1997] (lllll) the sense strand comprises a modified nucleotide sequence according to SEQ ID NO: 404 and the antisense strand comprises a modified nucleotide sequence according to SEQ ID NO: 212;
[1998] (mmmmm) the sense strand comprises a modified nucleotide sequence according to SEQ ID NO: 405 and the antisense strand comprises a modified nucleotide sequence according to SEQ ID NO: 213;
[1999] (nnnnn) the sense strand comprises a modified nucleotide sequence according to SEQ ID NO: 406 and the antisense strand comprises a modified nucleotide sequence according to SEQ ID NO: 214;
[2000] (ooooo) the sense strand comprises a modified nucleotide sequence according to SEQ ID NO: 407 and the antisense strand comprises a modified nucleotide sequence according to SEQ ID NO: 215;
[2001] (ppppp) the sense strand comprises a modified nucleotide sequence according to SEQ ID NO: 408 and the antisense strand comprises a modified nucleotide sequence according to SEQ ID NO: 216;
[2002] (qqqqq) the sense strand comprises a modified nucleotide sequence according to SEQ ID NO: 409 and the antisense strand comprises a modified nucleotide sequence according to SEQ ID NO: 217;
[2003] (rrrrr) the sense strand comprises a modified nucleotide sequence according to SEQ ID NO: 410 and the antisense strand comprises a modified nucleotide sequence according to SEQ ID NO: 218;
[2004] (sssss) the sense strand comprises a modified nucleotide sequence according to SEQ ID NO: 411 and the antisense strand comprises a modified nucleotide sequence according to SEQ ID NO: 219;
[2005] (ttttt) the sense strand comprises a modified nucleotide sequence according to SEQ ID NO: 412 and the antisense strand comprises a modified nucleotide sequence according to SEQ ID NO: 220;
[2006] (uuuuu) the sense strand comprises a modified nucleotide sequence according to SEQ ID NO: 413 and the antisense strand comprises a modified nucleotide sequence according to SEQ ID NO: 221;
[2007] (vvvvv) the sense strand comprises a modified nucleotide sequence according to SEQ ID NO: 414 and the antisense strand comprises a modified nucleotide sequence according to SEQ ID NO: 222;
[2008] (wwwww) the sense strand comprises a modified nucleotide sequence according to SEQ ID NO: 415 and the antisense strand comprises a modified nucleotide sequence according to SEQ ID NO: 223;
[2009] (xxxxx) the sense strand comprises a modified nucleotide sequence according to SEQ ID NO: 416 and the antisense strand comprises a modified nucleotide sequence according to SEQ ID NO: 224;
[2010] (yyyyy) the sense strand comprises a modified nucleotide sequence according to SEQ ID NO: 417 and the antisense strand comprises a modified nucleotide sequence according to SEQ ID NO: 225;
[2011] (zzzzz) the sense strand comprises a modified nucleotide sequence according to SEQ ID NO: 418 and the antisense strand comprises a modified nucleotide sequence according to SEQ ID NO: 226;
[2012] (aaaaaa) the sense strand comprises a modified nucleotide sequence according to SEQ ID NO: 419 and the antisense strand comprises a modified nucleotide sequence according to SEQ ID NO: 227;
[2013] (bbbbbb) the sense strand comprises a modified nucleotide sequence according to SEQ ID NO: 420 and the antisense strand comprises a modified nucleotide sequence according to SEQ ID NO: 228;
[2014] (cccccc) the sense strand comprises a modified nucleotide sequence according to SEQ ID NO: 421 and the antisense strand comprises a modified nucleotide sequence according to SEQ ID NO: 229;
[2015] (dddddd) the sense strand comprises a modified nucleotide sequence according to SEQ ID NO: 422 and the antisense strand comprises a modified nucleotide sequence according to SEQ ID NO: 230;
[2016] (eeeeee) the sense strand comprises a modified nucleotide sequence according to SEQ ID NO: 423 and the antisense strand comprises a modified nucleotide sequence according to SEQ ID NO: 231;
[2017] (ffffff) the sense strand comprises a modified nucleotide sequence according to SEQ ID NO: 424 and the antisense strand comprises a modified nucleotide sequence according to SEQ ID NO: 232;
[2018] (gggggg) the sense strand comprises a modified nucleotide sequence according to SEQ ID NO: 425 and the antisense strand comprises a modified nucleotide sequence according to SEQ ID NO: 233;
[2019] (hhhhhh) the sense strand comprises a modified nucleotide sequence according to SEQ ID NO: 426 and the antisense strand comprises a modified nucleotide sequence according to SEQ ID NO: 234;
[2020] (iiiiii) the sense strand comprises a modified nucleotide sequence according to SEQ ID NO: 427 and the antisense strand comprises a modified nucleotide sequence according to SEQ ID NO: 235;
[2021] (jjjjjj) the sense strand comprises a modified nucleotide sequence according to SEQ ID NO: 428 and the antisense strand comprises a modified nucleotide sequence according to SEQ ID NO: 236;
[2022] (kkkkkk) the sense strand comprises a modified nucleotide sequence according to SEQ ID NO: 429 and the antisense strand comprises a modified nucleotide sequence according to SEQ ID NO: 237;
[2023] (llllll) the sense strand comprises a modified nucleotide sequence according to SEQ ID NO: 430 and the antisense strand comprises a modified nucleotide sequence according to SEQ ID NO: 238;
[2024] (mmmmmm) the sense strand comprises a modified nucleotide sequence according to SEQ ID NO: 431 and the antisense strand comprises a modified nucleotide sequence according to SEQ ID NO: 239;
[2025] (nnnnnn) the sense strand comprises a modified nucleotide sequence according to SEQ ID NO: 432 and the antisense strand comprises a modified nucleotide sequence according to SEQ ID NO: 240;
[2026] (oooooo) the sense strand comprises a modified nucleotide sequence according to SEQ ID NO: 433 and the antisense strand comprises a modified nucleotide sequence according to SEQ ID NO: 241;
[2027] (pppppp) the sense strand comprises a modified nucleotide sequence according to SEQ ID NO: 434 and the antisense strand comprises a modified nucleotide sequence according to SEQ ID NO: 242;
[2028] (qqqqqq) the sense strand comprises a modified nucleotide sequence according to SEQ ID NO: 435 and the antisense strand comprises a modified nucleotide sequence according to SEQ ID NO: 243;
[2029] (rrrrrr) the sense strand comprises a modified nucleotide sequence according to SEQ ID NO: 436 and the antisense strand comprises a modified nucleotide sequence according to SEQ ID NO: 244;
[2030] (ssssss) the sense strand comprises a modified nucleotide sequence according to SEQ ID NO: 437 and the antisense strand comprises a modified nucleotide sequence according to SEQ ID NO: 245;
[2031] (tttttt) the sense strand comprises a modified nucleotide sequence according to SEQ ID NO: 438 and the antisense strand comprises a modified nucleotide sequence according to SEQ ID NO: 246;
[2032] (uuuuuu) the sense strand comprises a modified nucleotide sequence according to SEQ ID NO: 439 and the antisense strand comprises a modified nucleotide sequence according to SEQ ID NO: 247;
[2033] (vvvvvv) the sense strand comprises a modified nucleotide sequence according to SEQ ID NO: 440 and the antisense strand comprises a modified nucleotide sequence according to SEQ ID NO: 248;
[2034] (wwwwww) the sense strand comprises a modified nucleotide sequence according to SEQ ID NO: 441 and the antisense strand comprises a modified nucleotide sequence according to SEQ ID NO: 249;
[2035] (xxxxxx) the sense strand comprises a modified nucleotide sequence according to SEQ ID NO: 442 and the antisense strand comprises a modified nucleotide sequence according to SEQ ID NO: 250;
[2036] (yyyyyy) the sense strand comprises a modified nucleotide sequence according to SEQ ID NO: 443 and the antisense strand comprises a modified nucleotide sequence according to SEQ ID NO: 251;
[2037] (zzzzzz) the sense strand comprises a modified nucleotide sequence according to SEQ ID NO: 444 and the antisense strand comprises a modified nucleotide sequence according to SEQ ID NO: 252;
[2038] (aaaaaaa) the sense strand comprises a modified nucleotide sequence according to SEQ ID NO: 445 and the antisense strand comprises a modified nucleotide sequence according to SEQ ID NO: 253;
[2039] (bbbbbbb) the sense strand comprises a modified nucleotide sequence according to SEQ ID NO: 446 and the antisense strand comprises a modified nucleotide sequence according to SEQ ID NO: 254;
[2040] (ccccccc) the sense strand comprises a modified nucleotide sequence according to SEQ ID NO: 447 and the antisense strand comprises a modified nucleotide sequence according to SEQ ID NO: 255;
[2041] (ddddddd) the sense strand comprises a modified nucleotide sequence according to SEQ ID NO: 448 and the antisense strand comprises a modified nucleotide sequence according to SEQ ID NO: 256;
[2042] (eeeeeee) the sense strand comprises a modified nucleotide sequence according to SEQ ID NO: 449 and the antisense strand comprises a modified nucleotide sequence according to SEQ ID NO: 257;
[2043] (fffffff) the sense strand comprises a modified nucleotide sequence according to SEQ ID NO: 450 and the antisense strand comprises a modified nucleotide sequence according to SEQ ID NO: 258;
[2044] (ggggggg) the sense strand comprises a modified nucleotide sequence according to SEQ ID NO: 451 and the antisense strand comprises a modified nucleotide sequence according to SEQ ID NO: 259;
[2045] (hhhhhhh) the sense strand comprises a modified nucleotide sequence according to SEQ ID NO: 452 and the antisense strand comprises a modified nucleotide sequence according to SEQ ID NO: 260;
[2046] (iiiiii) the sense strand comprises a modified nucleotide sequence according to SEQ ID NO: 453 and the antisense strand comprises a modified nucleotide sequence according to SEQ ID NO: 261;
[2047] (jjjjjjj) the sense strand comprises a modified nucleotide sequence according to SEQ ID NO: 454 and the antisense strand comprises a modified nucleotide sequence according to SEQ ID NO: 262;
[2048] (kkkkkkk) the sense strand comprises a modified nucleotide sequence according to SEQ ID NO: 455 and the antisense strand comprises a modified nucleotide sequence according to SEQ ID NO: 263;
[2049] (lllllll) the sense strand comprises a modified nucleotide sequence according to SEQ ID NO: 456 and the antisense strand comprises a modified nucleotide sequence according to SEQ ID NO: 264;
[2050] (mmmmmmm) the sense strand comprises a modified nucleotide sequence according to SEQ ID NO: 457 and the antisense strand comprises a modified nucleotide sequence according to SEQ ID NO: 265;
[2051] (nnnnnnn) the sense strand comprises a modified nucleotide sequence according to SEQ ID NO: 458 and the antisense strand comprises a modified nucleotide sequence according to SEQ ID NO: 266;
[2052] (ooooooo) the sense strand comprises a modified nucleotide sequence according to SEQ ID NO: 459 and the antisense strand comprises a modified nucleotide sequence according to SEQ ID NO: 267;
[2053] (ppppppp) the sense strand comprises a modified nucleotide sequence according to SEQ ID NO: 460 and the antisense strand comprises a modified nucleotide sequence according to SEQ ID NO: 268;
[2054] (qqqqqqq) the sense strand comprises a modified nucleotide sequence according to SEQ ID NO: 461 and the antisense strand comprises a modified nucleotide sequence according to SEQ ID NO: 269;
[2055] (rrrrrrrr) the sense strand comprises a modified nucleotide sequence according to SEQ ID NO: 462 and the antisense strand comprises a modified nucleotide sequence according to SEQ ID NO: 270;
[2056] (sssssss) the sense strand comprises a modified nucleotide sequence according to SEQ ID NO: 463 and the antisense strand comprises a modified nucleotide sequence according to SEQ ID NO: 271;
[2057] (ttttttt) the sense strand comprises a modified nucleotide sequence according to SEQ ID NO: 464 and the antisense strand comprises a modified nucleotide sequence according to SEQ ID NO: 272;
[2058] (uuuuuuu) the sense strand comprises a modified nucleotide sequence according to SEQ ID NO: 465 and the antisense strand comprises a modified nucleotide sequence according to SEQ ID NO: 273;
[2059] (vvvvvvv) the sense strand comprises a modified nucleotide sequence according to SEQ ID NO: 466 and the antisense strand comprises a modified nucleotide sequence according to SEQ ID NO: 274;
[2060] (wwwwwww) the sense strand comprises a modified nucleotide sequence according to SEQ ID NO: 467 and the antisense strand comprises a modified nucleotide sequence according to SEQ ID NO: 275;
[2061] (xxxxxxx) the sense strand comprises a modified nucleotide sequence according to SEQ ID NO: 468 and the antisense strand comprises a modified nucleotide sequence according to SEQ ID NO: 276;
[2062] (yyyyyyy) the sense strand comprises a modified nucleotide sequence according to SEQ ID NO: 469 and the antisense strand comprises a modified nucleotide sequence according to SEQ ID NO: 277;
[2063] (zzzzzzz) the sense strand comprises a modified nucleotide sequence according to SEQ ID NO: 470 and the antisense strand comprises a modified nucleotide sequence according to SEQ ID NO: 278;
[2064] (aaaaaaaa) the sense strand comprises a modified nucleotide sequence according to SEQ ID NO: 471 and the antisense strand comprises a modified nucleotide sequence according to SEQ ID NO: 279;
[2065] (bbbbbbbb) the sense strand comprises a modified nucleotide sequence according to SEQ ID NO: 472 and the antisense strand comprises a modified nucleotide sequence according to SEQ ID NO: 280;
[2066] (cccccccc) the sense strand comprises a modified nucleotide sequence according to SEQ ID NO: 473 and the antisense strand comprises a modified nucleotide sequence according to SEQ ID NO: 281;
[2067] (dddddddd) the sense strand comprises a modified nucleotide sequence according to SEQ ID NO: 474 and the antisense strand comprises a modified nucleotide sequence according to SEQ ID NO: 282;
[2068] (eeeeeeee) the sense strand comprises a modified nucleotide sequence according to SEQ ID NO: 475 and the antisense strand comprises a modified nucleotide sequence according to SEQ ID NO: 283;
[2069] (ffffffff) the sense strand comprises a modified nucleotide sequence according to SEQ ID NO: 476 and the antisense strand comprises a modified nucleotide sequence according to SEQ ID NO: 284;
[2070] (gggggggg) the sense strand comprises a modified nucleotide sequence according to SEQ ID NO: 477 and the antisense strand comprises a modified nucleotide sequence according to SEQ ID NO: 285;
[2071] (hhhhhhhh) the sense strand comprises a modified nucleotide sequence according to SEQ ID NO: 478 and the antisense strand comprises a modified nucleotide sequence according to SEQ ID NO: 286;
[2072] (iiiiiii) the sense strand comprises a modified nucleotide sequence according to SEQ ID NO: 479 and the antisense strand comprises a modified nucleotide sequence according to SEQ ID NO: 287; or
[2073] (jjjjjjjj) the sense strand comprises a modified nucleotide sequence according to SEQ ID NO: 480 and the antisense strand comprises a modified nucleotide sequence according to SEQ ID NO: 288.

[2074] Embodiment 109. The oligomeric duplex of any one of embodiments 97-108, wherein the first modified oligonucleotide and/or second modified oligonucleotide comprises a targeting ligand.

[2075] Embodiment 110. The oligomeric duplex of embodiment 109, wherein the first modified oligonucleotide comprises a targeting ligand conjugated to its 3′ end.

[2076] Embodiment 111. The oligomeric duplex of embodiment 109, wherein the first modified oligonucleotide comprises a targeting ligand conjugated to its 5′ end.

[2077] Embodiment 112. The oligomeric duplex of embodiment 109, wherein the second modified oligonucleotide comprises a targeting ligand conjugated to its 3′ end.

[2078] Embodiment 113. The oligomeric duplex of embodiment 109, wherein the second modified oligonucleotide comprises a targeting ligand conjugated to its 5′ end.

[2079] Embodiment 114. The oligomeric duplex of any one of embodiments 109-113, wherein the targeting ligand targets a hepatocyte, and optionally wherein the targeting ligand comprises a galactose trimer.

[2080] Embodiment 115. The oligomeric duplex of any one of embodiments 109-114, wherein the targeting ligand comprises N-acetylgalactosamine (GalNAc).

[2081] Embodiment 116. The oligomeric duplex of any one of embodiments 109-115, wherein the targeting ligand comprises a structure according to Formula I:

[chemical structure]

wherein R is:
[2082] (i) the first modified oligonucleotide or the second modified oligonucleotide; or
[2083] (ii) a linker conjugated to the first modified oligonucleotide or the second modified oligonucleotide.

[2084] Embodiment 117. The oligomeric duplex of embodiment 116, wherein R is a linker conjugated to the first modified oligonucleotide or the second modified oligonucleotide having a structure according to Formula III:

[chemical structure]

wherein:
[2085] (i) connection point C of Formula III is conjugated to Formula I, and connection point D of Formula III is conjugated to the first modified oligonucleotide or the second modified oligonucleotide; or
[2086] (ii) connection point C of Formula III is conjugated to Formula I, and connection point D of Formula III is conjugated to a phosphate group which is conjugated to the first modified oligonucleotide or the second modified oligonucleotide.

[2087] Embodiment 118. The oligomeric duplex of embodiment 117, wherein Formula III or the phosphate group is conjugated to the 3′ end or the 5′ end of the first modified oligonucleotide or the second modified oligonucleotide.

[2088] Embodiment 119. The oligomeric duplex of embodiment 117, wherein Formula III or the phosphate group is conjugated to an internal nucleotide or nucleoside base of the first modified oligonucleotide or the second modified oligonucleotide.

[2089] Embodiment 120. The oligomeric duplex of any one of embodiments 109-115, wherein the first modified oligonucleotide or the second modified oligonucleotide comprises a targeting ligand and linker according to Formula V:

[chemical structure]

[2090] Embodiment 121. The oligomeric duplex of any one of embodiments 97-120, wherein the oligomeric duplex is an siRNA molecule.

[2091] Embodiment 122. The oligomeric duplex of any one of embodiments 97-120, wherein the oligomeric duplex is an shRNA molecule.

[2092] Embodiment 123. A pharmaceutical composition comprising the RNAi agent of any one of embodiments 1-78, the modified oligonucleotide of any one of embodiments 79-96, or the oligomeric duplex of any one of embodiments 97-122, and a pharmaceutically acceptable carrier.

[2093] Embodiment 124. A lipid nanoparticle comprising the RNAi agent of any one of embodiments 1-78, the modified oligonucleotide of any one of embodiments 79-96, the oligomeric duplex of any one of embodiments 97-122, or the pharmaceutical composition of embodiment 123.

[2094] Embodiment 125. A method of making a pharmaceutical composition, comprising combining the RNAi agent of any one of embodiments 1-78, the modified oligonucleotide of any one of embodiments 79-96, or the oligomeric duplex of any one of embodiments 97-122, with a delivery vehicle selected from the group consisting of a phosphate-buffered saline (PBS), lipid, a nanoparticle, a polymer, a liposome, a micelle, a dynamic polyconjugate (DPC), and antibody-oligo conjugate.

[2095] Embodiment 126. A method of treating metabolic dysfunction-associated steatotic liver disease (MASLD) or metabolic dysfunction-associated steatotic liver (MASL) in a subject, comprising:
[2096] administering to the subject an effective amount of a liver-targeted modified oligonucleotide, a liver-targeted oligomeric duplex, or a liver-targeted RNAi agent that inhibits expression of glucokinase (GCK).

[2097] Embodiment 127. Use of a liver-targeted modified oligonucleotide, a liver-targeted oligomeric duplex, or a liver-targeted RNAi agent that inhibits expression of glucokinase (GCK) for the manufacture of a medicament for the treatment of metabolic dysfunction-associated steatotic liver disease (MASLD) or metabolic dysfunction-associated steatotic liver (MASL) in a subject.

[2098] Embodiment 128. A method of inhibiting expression of glucokinase (GCK) in a subject, comprising:
[2099] administering to the subject an effective amount of a liver-targeted modified oligonucleotide, a liver-targeted oligomeric duplex, or a liver-targeted RNAi agent that inhibits expression of GCK.

[2100] Embodiment 129. Use of a liver-targeted modified oligonucleotide, a liver-targeted oligomeric duplex, or a liver-targeted RNAi agent in the manufacture of a medicament for inhibiting expression of glucokinase (GCK) in a hepatocyte of a subject.

[2101] Embodiment 130. A method of controlling or reducing liver fat accumulation in a subject, comprising:
[2102] administering to the subject an effective amount of a liver-targeted modified oligonucleotide, a liver-targeted oligomeric duplex, or a liver-targeted RNAi agent that inhibits expression of glucokinase (GCK).

[2103] Embodiment 131. Use of a liver-targeted modified oligonucleotide, a liver-targeted oligomeric duplex, or a liver-targeted RNAi agent that inhibits expression of glucokinase (GCK) in the manufacture of a medicament for controlling or reducing liver fat accumulation in a subject.

[2104] Embodiment 132. The method or use of embodiment 130 or 131, wherein the method treats metabolic dysfunction-associated steatotic liver disease (MASLD) or metabolic dysfunction-associated steatohepatitis (MASH) in the subject.

[2105] Embodiment 133. The method or use of embodiment 130 or 131, wherein the method treats nonalcoholic fatty liver disease (NAFLD) or nonalcoholic steatohepatitis (NASH) in the subject.

[2106] Embodiment 134. The method or use of any one of embodiments 126-133, wherein the liver-targeted modified oligonucleotide is the modified oligonucleotide of any one of embodiments 79-96.

[2107] Embodiment 135. The method or use of any one of embodiments 126-133, wherein the liver-targeted oligomeric duplex is the oligomeric duplex of any one of embodiments 97-122.

[2108] Embodiment 136. The method or use of any one of embodiments 126-133, wherein the RNAi agent comprises an antisense strand and a sense strand that at least partially complements the antisense strand, wherein:
[2109] (a) the antisense strand comprises at least 14 contiguous bases from any one of SEQ ID NO S: 1-96; and/or
[2110] (b) the sense strand comprises at least 14 contiguous bases from any one of SEQ ID NOS: 97-192.

[2111] Embodiment 137. The method or use of embodiment 136, wherein one or more bases of the antisense stand and/or the sense strand are modified.

[2112] Embodiment 138. The method or use of embodiment 137, wherein:
[2113] (a) the antisense strand comprises at least 14 contiguous bases from any one of SEQ ID NOS: 193-288; and/or
[2114] (b) the sense strand comprises at least 14 contiguous bases from any one of SEQ ID NOS: 289-384 and 385-480.

[2115] Embodiment 139. The method or use of any one of embodiments 126-133, wherein the RNAi agent comprises an antisense strand and a sense strand that at least partially complements the antisense strand, and a targeting ligand conjugated to the antisense strand or the sense strand, wherein the targeting ligand targets a hepatocyte.

[2116] Embodiment 140. The method or use of any one of embodiments 136-139, wherein the antisense strand comprises at least 14 contiguous bases that complement a sequence in an mRNA molecule that encodes GCK (SEQ ID NO: 481).

[2117] Embodiment 141. The method or use of any one of embodiments 136-140, wherein the antisense strand and the sense strand form a duplex of at least 14 bases in length.

[2118] Embodiment 142. The method or use of any one of embodiments 136-141, wherein the antisense strand and the sense strand form a duplex of between 15 and 30 bases in length.

[2119] Embodiment 143. The method or use of any one of embodiments 136-142, wherein the antisense strand or a subsequence thereof differs by 0, 1, 2, 3, or 4 nucleotides from an equal length portion of any one of SEQ ID NOS: 1-96 and 193-288, wherein the subsequence is at least 14, 15, 16, 17, 18, 19, 20, 21, 22, or 23 bases in length.

[2120] Embodiment 144. The method or use of embodiment 143, wherein the antisense strand comprises, in order, nucleotides 1-23 of any one of SEQ ID NOS: 1-96 and 193-288.

[2121] Embodiment 145. The method or use of any one of embodiments 139-144, wherein the antisense strand comprises at least 14 contiguous bases from any one of SEQ ID NOS: 1-96 and 193-288.

[2122] Embodiment 146. The method or use of any one of embodiments 136-145, wherein the antisense strand comprises, in order, nucleobases 1-14 of any one of SEQ ID NOS: 1-96 and 193-288.

[2123] Embodiment 147. The method or use of any one of embodiments 136-146, wherein the antisense strand comprises at least 14 contiguous bases from any one of SEQ ID NOS: 8, 11, 14, 16, 35, 36, 38, 39, 41, 42, 52, 77, 84, 86, 87, 88, 89, 90, 93, 200, 203, 206, 208, 227, 228, 230, 231, 233, 234, 244, 269, 276, 278, 279, 280, 281, 282, and 285.

[2124] Embodiment 148. The method or use of any one of embodiments 136-147, wherein the sense strand or a subsequence thereof differs by 0, 1, 2, 3, or 4 nucleotides from an equal length portion of any one of SEQ ID NOS: 97-192, 289-384, and 385-480, wherein the subsequence is at least 14, 15, 16, 17, 18, 19, 20, or 21 bases in length.

[2125] Embodiment 149. The method or use of embodiment 148, wherein the sense strand comprises, in order, nucleotides 1-21 of any one of SEQ ID NOS: 97-192, 289-384, and 385-480.

[2126] Embodiment 150. The method or use of any one of embodiments 139-149, wherein the sense strand comprises at least 14 contiguous bases from any one of SEQ ID NOS: 97-192, 289-384, and 385-480.

[2127] Embodiment 151. The method or use of any one of embodiments 136-150, wherein the sense strand comprises, in order, nucleobases 1-14 of any one of SEQ ID NOS: 97-192, 289-384, and 385-480.

[2128] Embodiment 152. The method or use of any one of embodiments 136-151, wherein the sense strand comprises at least 14 contiguous bases from any one of SEQ ID NOS: 104, 107, 110, 112, 131, 132, 134, 135, 137, 138, 148, 173, 180, 182, 183, 184, 185, 186, 189, 296, 299, 302, 304, 323, 324, 326, 327, 329, 330, 340, 365, 372, 374, 375, 376, 377, 378, 381, 392, 395, 398, 400, 419, 420, 422, 423, 425 426, 436, 461, 468, 470, 471, 472, 473, 474, and 477.

[2129] Embodiment 153. The method or use of any one of embodiments 136-152, wherein the antisense strand comprises at least 16 contiguous bases that complement a sequence in an mRNA molecule that encodes GCK (SEQ ID NO: 481).

[2130] Embodiment 154. The method or use of any one of embodiments 136-153, wherein the antisense strand and the sense strand form a duplex of at least 16 bases in length.

[2131] Embodiment 155. The method or use of any one of embodiments 136-154, wherein the antisense strand comprises at least 16 contiguous bases from any one of SEQ ID NOS: 1-96 and 193-288.

[2132] Embodiment 156. The method or use of any one of embodiments 136-155, wherein the antisense strand comprises at least 16 contiguous bases from any one of SEQ ID NOS: 8, 11, 14, 16, 35, 36, 38, 39, 41, 42, 52, 77, 84, 86, 87, 88, 89, 90, 93, 200, 203, 206, 208, 227, 228, 230, 231, 233, 234, 244, 269, 276, 278, 279, 280, 281, 282, and 285.

[2133] Embodiment 157. The method or use of any one of embodiments 136-156, wherein the antisense strand comprises, in order, nucleobases 1-16, 1-17, 1-18, 1-19, 1-20, 1-21, 1-22, 1-23, 2-17, 2-18, 2-19, 2-20, 2-21, 2-22, 2-23, 3-18, 3-19, 3-20, 3-21, 3-22, 3-23, 4-19, 4-20, 4-21, 4-22, 4-23, 5-21, 5-22, 5-23, 6-20, 6-21, 6-22, 6-23, 7-22, 7-23, or 8-23 of any one of SEQ ID NOS: 1-96 and 193-288.

[2134] Embodiment 158. The method or use of any one of embodiments 136-157, wherein the antisense strand comprises a nucleotide sequence according to any one of SEQ ID NOS: 1-96.

[2135] Embodiment 159. The method or use of embodiment 158, wherein one or more nucleotides of the antisense strand are modified.

[2136] Embodiment 160. The method or use of embodiment 158, wherein the antisense strand comprises a nucleotide sequence according to any one of SEQ ID NOS: 8, 11, 14, 16, 35, 36, 38, 39, 41, 42, 52, 77, 84, 86, 87, 88, 89, 90, 93.

[2137] Embodiment 161. The method or use of embodiment 160, wherein one or more nucleotides of the antisense strand are modified.

[2138] Embodiment 162. The method or use of embodiment 159 or 161, wherein the antisense strand has a modification pattern according to nsNfsnnnNfnnnnnnnNfnNfnnnnnsnsn.

[2139] Embodiment 163. The method or use of any one of embodiments 158-161, wherein the antisense strand comprises a modified nucleotide sequence according to any one of SEQ ID NOS: 193-288.

[2140] Embodiment 164. The method or use of embodiment 163, wherein the antisense strand comprises a modified nucleotide sequence according to any one of SEQ ID NOS: 200, 203, 206, 208, 227, 228, 230, 231, 233, 234, 244, 269, 276, 278, 279, 280, 281, 282, and 285.

[2141] Embodiment 165. The method or use of any one of embodiments 136-164, wherein the sense strand comprises at least 16 contiguous bases from any one of SEQ ID NOS: 97-192, 289-384, and 385-480.

[2142] Embodiment 166. The method or use of embodiment 165, wherein the sense strand comprises at least 16 contiguous bases from any one of SEQ ID NOS: 104, 107, 110, 112, 131, 132, 134, 135, 137, 138, 148, 173, 180, 182, 183, 184, 185, 186, 189, 296, 299, 302, 304, 323, 324, 326, 327, 329, 330, 340, 365, 372, 374, 375, 376, 377, 378, 381, 392, 395, 398, 400, 419, 420, 422, 423, 425 426, 436, 461, 468, 470, 471, 472, 473, 474, and 477.

[2143] Embodiment 167. The method or use of any one of embodiments 136-166, wherein the sense strand comprises, in order, nucleobases 1-16, 1-17, 1-18, 1-19, 1-20, 1-21, 1-22, 1-23, 2-17, 2-18, 2-19, 2-20, 2-21, 2-22, 2-23, 3-18, 3-19, 3-20, 3-21, 3-22, 3-23, 4-19, 4-20, 4-21, 4-22, 4-23, 5-21, 5-22, 5-23, 6-20, 6-21, 6-22, 6-23, 7-22, 7-23, or 8-23 of any one of SEQ ID NOS: 97-192, 289-384, and 385-480.

[2144] Embodiment 168. The method or use of any one of embodiments 136-167, wherein the sense strand comprises a nucleobase sequence according to any one of SEQ ID NOS: 97-192.

[2145] Embodiment 169. The method or use of embodiment 168, wherein one or more nucleotides of the sense strand are modified.

[2146] Embodiment 170. The method or use of embodiment 168, wherein the sense strand comprises a nucleobase sequence according to any one of SEQ ID NOS: 104, 107, 110, 112, 131, 132, 134, 135, 137, 138, 148, 173, 180, 182, 183, 184, 185, 186, and 189.

[2147] Embodiment 171. The method or use of embodiment 170, wherein one or more nucleotides of the sense strand are modified.

[2148] Embodiment 172. The method or use of embodiment 169 or 171, wherein the sense strand has a modification pattern according to nsnsnnnnNfnNfNfNfnnnnnnnnsnsn.

[2149] Embodiment 173. The method or use of embodiment 169 or 171, wherein the sense strand has a modification pattern according to nsnsnnnnNfnNfNfNfnnnnnnnnnn.

[2150] Embodiment 174. The method or use of any one of embodiments 168-173, wherein the sense strand comprises a modified nucleotide sequence according to any one of SEQ ID NOS: 289-384 and 385-480.

[2151] Embodiment 175. The method or use of embodiment 174, wherein the sense strand comprises a modified nucleotide sequence according to any one of SEQ ID NOS: 296, 299, 302, 304, 323, 324, 326, 327, 329, 330, 340, 365, 372, 374, 375, 376, 377, 378, 381, 392, 395, 398, 400, 419, 420, 422, 423, 425 426, 436, 461, 468, 470, 471, 472, 473, 474, and 477.

[2152] Embodiment 176. The method or use of any one of embodiments 136-175, wherein:
[2153] (a) the sense strand comprises a nucleobase sequence according to SEQ ID NO: 97 and the antisense strand comprises a nucleobase sequence according to SEQ ID NO: 1;
[2154] (b) the sense strand comprises a nucleobase sequence according to SEQ ID NO: 98 and the antisense strand comprises a nucleobase sequence according to SEQ ID NO: 2;
[2155] (c) the sense strand comprises a nucleobase sequence according to SEQ ID NO: 99 and the antisense strand comprises a nucleobase sequence according to SEQ ID NO: 3;
[2156] (d) the sense strand comprises a nucleobase sequence according to SEQ ID NO: 100 and the antisense strand comprises a nucleobase sequence according to SEQ ID NO: 4;
[2157] (e) the sense strand comprises a nucleobase sequence according to SEQ ID NO: 101 and the antisense strand comprises a nucleobase sequence according to SEQ ID NO: 5;
[2158] (f) the sense strand comprises a nucleobase sequence according to SEQ ID NO: 102 and the antisense strand comprises a nucleobase sequence according to SEQ ID NO: 6;
[2159] (g) the sense strand comprises a nucleobase sequence according to SEQ ID NO: 103 and the antisense strand comprises a nucleobase sequence according to SEQ ID NO: 7;
[2160] (h) the sense strand comprises a nucleobase sequence according to SEQ ID NO: 104 and the antisense strand comprises a nucleobase sequence according to SEQ ID NO: 8;
[2161] (i) the sense strand comprises a nucleobase sequence according to SEQ ID NO: 105 and the antisense strand comprises a nucleobase sequence according to SEQ ID NO: 9;
[2162] (j) the sense strand comprises a nucleobase sequence according to SEQ ID NO: 106 and the antisense strand comprises a nucleobase sequence according to SEQ ID NO: 10;
[2163] (k) the sense strand comprises a nucleobase sequence according to SEQ ID NO: 107 and the antisense strand comprises a nucleobase sequence according to SEQ ID NO: 11;
[2164] (l) the sense strand comprises a nucleobase sequence according to SEQ ID NO: 108 and the antisense strand comprises a nucleobase sequence according to SEQ ID NO: 12;
[2165] (m) the sense strand comprises a nucleobase sequence according to SEQ ID NO: 109 and the antisense strand comprises a nucleobase sequence according to SEQ ID NO: 13;
[2166] (n) the sense strand comprises a nucleobase sequence according to SEQ ID NO: 110 and the antisense strand comprises a nucleobase sequence according to SEQ ID NO: 14;
[2167] (o) the sense strand comprises a nucleobase sequence according to SEQ ID NO: 111 and the antisense strand comprises a nucleobase sequence according to SEQ ID NO: 15;
[2168] (p) the sense strand comprises a nucleobase sequence according to SEQ ID NO: 112 and the antisense strand comprises a nucleobase sequence according to SEQ ID NO: 16;
[2169] (q) the sense strand comprises a nucleobase sequence according to SEQ ID NO: 113 and the antisense strand comprises a nucleobase sequence according to SEQ ID NO: 17;
[2170] (r) the sense strand comprises a nucleobase sequence according to SEQ ID NO: 114 and the antisense strand comprises a nucleobase sequence according to SEQ ID NO: 18;
[2171] (s) the sense strand comprises a nucleobase sequence according to SEQ ID NO: 115 and the antisense strand comprises a nucleobase sequence according to SEQ ID NO: 19;
[2172] (t) the sense strand comprises a nucleobase sequence according to SEQ ID NO: 116 and the antisense strand comprises a nucleobase sequence according to SEQ ID NO: 20;
[2173] (u) the sense strand comprises a nucleobase sequence according to SEQ ID NO: 117 and the antisense strand comprises a nucleobase sequence according to SEQ ID NO: 21;
[2174] (v) the sense strand comprises a nucleobase sequence according to SEQ ID NO: 118 and the antisense strand comprises a nucleobase sequence according to SEQ ID NO: 22;
[2175] (w) the sense strand comprises a nucleobase sequence according to SEQ ID NO: 119 and the antisense strand comprises a nucleobase sequence according to SEQ ID NO: 23;
[2176] (x) the sense strand comprises a nucleobase sequence according to SEQ ID NO: 120 and the antisense strand comprises a nucleobase sequence according to SEQ ID NO: 24;
[2177] (y) the sense strand comprises a nucleobase sequence according to SEQ ID NO: 121 and the antisense strand comprises a nucleobase sequence according to SEQ ID NO: 25;
[2178] (z) the sense strand comprises a nucleobase sequence according to SEQ ID NO: 122 and the antisense strand comprises a nucleobase sequence according to SEQ ID NO: 26;
[2179] (aa) the sense strand comprises a nucleobase sequence according to SEQ ID NO: 123 and the antisense strand comprises a nucleobase sequence according to SEQ ID NO: 27;
[2180] (bb) the sense strand comprises a nucleobase sequence according to SEQ ID NO: 124 and the antisense strand comprises a nucleobase sequence according to SEQ ID NO: 28;
[2181] (cc) the sense strand comprises a nucleobase sequence according to SEQ ID NO: 125 and the antisense strand comprises a nucleobase sequence according to SEQ ID NO: 29;
[2182] (dd) the sense strand comprises a nucleobase sequence according to SEQ ID NO: 126 and the antisense strand comprises a nucleobase sequence according to SEQ ID NO: 30;
[2183] (ee) the sense strand comprises a nucleobase sequence according to SEQ ID NO: 127 and the antisense strand comprises a nucleobase sequence according to SEQ ID NO: 31;
[2184] (ff) the sense strand comprises a nucleobase sequence according to SEQ ID NO: 128 and the antisense strand comprises a nucleobase sequence according to SEQ ID NO: 32;
[2185] (gg) the sense strand comprises a nucleobase sequence according to SEQ ID NO: 129 and the antisense strand comprises a nucleobase sequence according to SEQ ID NO: 33;
[2186] (hh) the sense strand comprises a nucleobase sequence according to SEQ ID NO: 130 and the antisense strand comprises a nucleobase sequence according to SEQ ID NO: 34;
[2187] (ii) the sense strand comprises a nucleobase sequence according to SEQ ID NO: 131 and the antisense strand comprises a nucleobase sequence according to SEQ ID NO: 35;
[2188] (jj) the sense strand comprises a nucleobase sequence according to SEQ ID NO: 132 and the antisense strand comprises a nucleobase sequence according to SEQ ID NO: 36;
[2189] (kk) the sense strand comprises a nucleobase sequence according to SEQ ID NO: 133 and the antisense strand comprises a nucleobase sequence according to SEQ ID NO: 37;
[2190] (ll) the sense strand comprises a nucleobase sequence according to SEQ ID NO: 134 and the antisense strand comprises a nucleobase sequence according to SEQ ID NO: 38;
[2191] (mm) the sense strand comprises a nucleobase sequence according to SEQ ID NO: 135 and the antisense strand comprises a nucleobase sequence according to SEQ ID NO: 39;
[2192] (nn) the sense strand comprises a nucleobase sequence according to SEQ ID NO: 136 and the antisense strand comprises a nucleobase sequence according to SEQ ID NO: 40;
[2193] (oo) the sense strand comprises a nucleobase sequence according to SEQ ID NO: 137 and the antisense strand comprises a nucleobase sequence according to SEQ ID NO: 41;
[2194] (pp) the sense strand comprises a nucleobase sequence according to SEQ ID NO: 138 and the antisense strand comprises a nucleobase sequence according to SEQ ID NO: 42;
[2195] (qq) the sense strand comprises a nucleobase sequence according to SEQ ID NO: 139 and the antisense strand comprises a nucleobase sequence according to SEQ ID NO: 43;
[2196] (rr) the sense strand comprises a nucleobase sequence according to SEQ ID NO: 140 and the antisense strand comprises a nucleobase sequence according to SEQ ID NO: 44;
[2197] (ss) the sense strand comprises a nucleobase sequence according to SEQ ID NO: 141 and the antisense strand comprises a nucleobase sequence according to SEQ ID NO: 45;
[2198] (tt) the sense strand comprises a nucleobase sequence according to SEQ ID NO: 142 and the antisense strand comprises a nucleobase sequence according to SEQ ID NO: 46;
[2199] (uu) the sense strand comprises a nucleobase sequence according to SEQ ID NO: 143 and the antisense strand comprises a nucleobase sequence according to SEQ ID NO: 47;
[2200] (vv) the sense strand comprises a nucleobase sequence according to SEQ ID NO: 144 and the antisense strand comprises a nucleobase sequence according to SEQ ID NO: 48;
[2201] (ww) the sense strand comprises a nucleobase sequence according to SEQ ID NO: 145 and the antisense strand comprises a nucleobase sequence according to SEQ ID NO: 49;
[2202] (xx) the sense strand comprises a nucleobase sequence according to SEQ ID NO: 146 and the antisense strand comprises a nucleobase sequence according to SEQ ID NO: 50;
[2203] (yy) the sense strand comprises a nucleobase sequence according to SEQ ID NO: 147 and the antisense strand comprises a nucleobase sequence according to SEQ ID NO: 51;
[2204] (zz) the sense strand comprises a nucleobase sequence according to SEQ ID NO: 148 and the antisense strand comprises a nucleobase sequence according to SEQ ID NO: 52;
[2205] (aaa) the sense strand comprises a nucleobase sequence according to SEQ ID NO: 149 and the antisense strand comprises a nucleobase sequence according to SEQ ID NO: 53;
[2206] (bbb) the sense strand comprises a nucleobase sequence according to SEQ ID NO: 150 and the antisense strand comprises a nucleobase sequence according to SEQ ID NO: 54;
[2207] (ccc) the sense strand comprises a nucleobase sequence according to SEQ ID NO: 151 and the antisense strand comprises a nucleobase sequence according to SEQ ID NO: 55;
[2208] (ddd) the sense strand comprises a nucleobase sequence according to SEQ ID NO: 152 and the antisense strand comprises a nucleobase sequence according to SEQ ID NO: 56;
[2209] (eee) the sense strand comprises a nucleobase sequence according to SEQ ID NO: 153 and the antisense strand comprises a nucleobase sequence according to SEQ ID NO: 57;
[2210] (fff) the sense strand comprises a nucleobase sequence according to SEQ ID NO: 154 and the antisense strand comprises a nucleobase sequence according to SEQ ID NO: 58;
[2211] (ggg) the sense strand comprises a nucleobase sequence according to SEQ ID NO: 155 and the antisense strand comprises a nucleobase sequence according to SEQ ID NO: 59;
[2212] (hhh) the sense strand comprises a nucleobase sequence according to SEQ ID NO: 156 and the antisense strand comprises a nucleobase sequence according to SEQ ID NO: 60;
[2213] (iii) the sense strand comprises a nucleobase sequence according to SEQ ID NO: 157 and the antisense strand comprises a nucleobase sequence according to SEQ ID NO: 61;
[2214] (jjj) the sense strand comprises a nucleobase sequence according to SEQ ID NO: 158 and the antisense strand comprises a nucleobase sequence according to SEQ ID NO: 62;
[2215] (kkk) the sense strand comprises a nucleobase sequence according to SEQ ID NO: 159 and the antisense strand comprises a nucleobase sequence according to SEQ ID NO: 63;
[2216] (lll) the sense strand comprises a nucleobase sequence according to SEQ ID NO: 160 and the antisense strand comprises a nucleobase sequence according to SEQ ID NO: 64;
[2217] (mmm) the sense strand comprises a nucleobase sequence according to SEQ ID NO: 161 and the antisense strand comprises a nucleobase sequence according to SEQ ID NO: 65;
[2218] (nnn) the sense strand comprises a nucleobase sequence according to SEQ ID NO: 162 and the antisense strand comprises a nucleobase sequence according to SEQ ID NO: 66;
[2219] (ooo) the sense strand comprises a nucleobase sequence according to SEQ ID NO: 163 and the antisense strand comprises a nucleobase sequence according to SEQ ID NO: 67;
[2220] (ppp) the sense strand comprises a nucleobase sequence according to SEQ ID NO: 164 and the antisense strand comprises a nucleobase sequence according to SEQ ID NO: 68;
[2221] (qqq) the sense strand comprises a nucleobase sequence according to SEQ ID NO: 165 and the antisense strand comprises a nucleobase sequence according to SEQ ID NO: 69;
[2222] (rrr) the sense strand comprises a nucleobase sequence according to SEQ ID NO: 166 and the antisense strand comprises a nucleobase sequence according to SEQ ID NO: 70;
[2223] (sss) the sense strand comprises a nucleobase sequence according to SEQ ID NO: 167 and the antisense strand comprises a nucleobase sequence according to SEQ ID NO: 71;
[2224] (ttt) the sense strand comprises a nucleobase sequence according to SEQ ID NO: 168 and the antisense strand comprises a nucleobase sequence according to SEQ ID NO: 72;
[2225] (uuu) the sense strand comprises a nucleobase sequence according to SEQ ID NO: 169 and the antisense strand comprises a nucleobase sequence according to SEQ ID NO: 73;
[2226] (vvv) the sense strand comprises a nucleobase sequence according to SEQ ID NO: 170 and the antisense strand comprises a nucleobase sequence according to SEQ ID NO: 74;
[2227] (www) the sense strand comprises a nucleobase sequence according to SEQ ID NO: 171 and the antisense strand comprises a nucleobase sequence according to SEQ ID NO: 75;
[2228] (xxx) the sense strand comprises a nucleobase sequence according to SEQ ID NO: 172 and the antisense strand comprises a nucleobase sequence according to SEQ ID NO: 76;
[2229] (yyy) the sense strand comprises a nucleobase sequence according to SEQ ID NO: 173 and the antisense strand comprises a nucleobase sequence according to SEQ ID NO: 77;
[2230] (zzz) the sense strand comprises a nucleobase sequence according to SEQ ID NO: 174 and the antisense strand comprises a nucleobase sequence according to SEQ ID NO: 78;
[2231] (aaaa) the sense strand comprises a nucleobase sequence according to SEQ ID NO: 175 and the antisense strand comprises a nucleobase sequence according to SEQ ID NO: 79;
[2232] (bbbb) the sense strand comprises a nucleobase sequence according to SEQ ID NO: 176 and the antisense strand comprises a nucleobase sequence according to SEQ ID NO: 80;
[2233] (cccc) the sense strand comprises a nucleobase sequence according to SEQ ID NO: 177 and the antisense strand comprises a nucleobase sequence according to SEQ ID NO: 81;
[2234] (dddd) the sense strand comprises a nucleobase sequence according to SEQ ID NO: 178 and the antisense strand comprises a nucleobase sequence according to SEQ ID NO: 82;
[2235] (eeee) the sense strand comprises a nucleobase sequence according to SEQ ID NO: 179 and the antisense strand comprises a nucleobase sequence according to SEQ ID NO: 83;
[2236] (ffff) the sense strand comprises a nucleobase sequence according to SEQ ID NO: 180 and the antisense strand comprises a nucleobase sequence according to SEQ ID NO: 84;
[2237] (gggg) the sense strand comprises a nucleobase sequence according to SEQ ID NO: 181 and the antisense strand comprises a nucleobase sequence according to SEQ ID NO: 85;
[2238] (hhhh) the sense strand comprises a nucleobase sequence according to SEQ ID NO: 182 and the antisense strand comprises a nucleobase sequence according to SEQ ID NO: 86;
[2239] (iiii) the sense strand comprises a nucleobase sequence according to SEQ ID NO: 183 and the antisense strand comprises a nucleobase sequence according to SEQ ID NO: 87;
[2240] (jjjj) the sense strand comprises a nucleobase sequence according to SEQ ID NO: 184 and the antisense strand comprises a nucleobase sequence according to SEQ ID NO: 88;
[2241] (kkkk) the sense strand comprises a nucleobase sequence according to SEQ ID NO: 185 and the antisense strand comprises a nucleobase sequence according to SEQ ID NO: 89;
[2242] (llll) the sense strand comprises a nucleobase sequence according to SEQ ID NO: 186 and the antisense strand comprises a nucleobase sequence according to SEQ ID NO: 90;
[2243] (mmmm) the sense strand comprises a nucleobase sequence according to SEQ ID NO: 187 and the antisense strand comprises a nucleobase sequence according to SEQ ID NO: 91;
[2244] (nnnn) the sense strand comprises a nucleobase sequence according to SEQ ID NO: 188 and the antisense strand comprises a nucleobase sequence according to SEQ ID NO: 92;
[2245] (oooo) the sense strand comprises a nucleobase sequence according to SEQ ID NO: 189 and the antisense strand comprises a nucleobase sequence according to SEQ ID NO: 93;
[2246] (pppp) the sense strand comprises a nucleobase sequence according to SEQ ID NO: 190 and the antisense strand comprises a nucleobase sequence according to SEQ ID NO: 94;
[2247] (qqqq) the sense strand comprises a nucleobase sequence according to SEQ ID NO: 191 and the antisense strand comprises a nucleobase sequence according to SEQ ID NO: 95; or
[2248] (rrrr) the sense strand comprises a nucleobase sequence according to SEQ ID NO: 192 and the antisense strand comprises a nucleobase sequence according to SEQ ID NO: 96.

[2249] Embodiment 177. The method or use of embodiment 176, wherein:
[2250] (a) the sense strand comprises a nucleobase sequence according to SEQ ID NO: 104 and the antisense strand comprises a nucleobase sequence according to SEQ ID NO: 8;
[2251] (b) the sense strand comprises a nucleobase sequence according to SEQ ID NO: 107 and the antisense strand comprises a nucleobase sequence according to SEQ ID NO: 11;
[2252] (c) the sense strand comprises a nucleobase sequence according to SEQ ID NO: 110 and the antisense strand comprises a nucleobase sequence according to SEQ ID NO: 14;
[2253] (d) the sense strand comprises a nucleobase sequence according to SEQ ID NO: 112 and the antisense strand comprises a nucleobase sequence according to SEQ ID NO: 16;
[2254] (e) the sense strand comprises a nucleobase sequence according to SEQ ID NO: 131 and the antisense strand comprises a nucleobase sequence according to SEQ ID NO: 35;
[2255] (f) the sense strand comprises a nucleobase sequence according to SEQ ID NO: 132 and the antisense strand comprises a nucleobase sequence according to SEQ ID NO: 36;
[2256] (g) the sense strand comprises a nucleobase sequence according to SEQ ID NO: 134 and the antisense strand comprises a nucleobase sequence according to SEQ ID NO: 38;
[2257] (h) the sense strand comprises a nucleobase sequence according to SEQ ID NO: 135 and the antisense strand comprises a nucleobase sequence according to SEQ ID NO: 39;
[2258] (i) the sense strand comprises a nucleobase sequence according to SEQ ID NO: 137 and the antisense strand comprises a nucleobase sequence according to SEQ ID NO: 41;
[2259] (j) the sense strand comprises a nucleobase sequence according to SEQ ID NO: 138 and the antisense strand comprises a nucleobase sequence according to SEQ ID NO: 42;
[2260] (k) the sense strand comprises a nucleobase sequence according to SEQ ID NO: 148 and the antisense strand comprises a nucleobase sequence according to SEQ ID NO: 52;
[2261] (l) the sense strand comprises a nucleobase sequence according to SEQ ID NO: 173 and the antisense strand comprises a nucleobase sequence according to SEQ ID NO: 77.
[2262] (m) the sense strand comprises a nucleobase sequence according to SEQ ID NO: 180 and the antisense strand comprises a nucleobase sequence according to SEQ ID NO: 84;
[2263] (n) the sense strand comprises a nucleobase sequence according to SEQ ID NO: 182 and the antisense strand comprises a nucleobase sequence according to SEQ ID NO: 86;
[2264] (o) the sense strand comprises a nucleobase sequence according to SEQ ID NO: 183 and the antisense strand comprises a nucleobase sequence according to SEQ ID NO: 87;
[2265] (p) the sense strand comprises a nucleobase sequence according to SEQ ID NO: 184 and the antisense strand comprises a nucleobase sequence according to SEQ ID NO: 88;
[2266] (q) the sense strand comprises a nucleobase sequence according to SEQ ID NO: 185 and the antisense strand comprises a nucleobase sequence according to SEQ ID NO: 89;
[2267] (r) the sense strand comprises a nucleobase sequence according to SEQ ID NO: 186 and the antisense strand comprises a nucleobase sequence according to SEQ ID NO: 90; or(s) the sense strand comprises a nucleobase sequence according to SEQ ID NO: 189 and the antisense strand comprises a nucleobase sequence according to SEQ ID NO: 93.

[2268] Embodiment 178. The method or use of embodiment 176 or 177, wherein:
[2269] (a) the sense strand comprises a modified nucleotide sequence according to SEQ ID NO: 289 and the antisense strand comprises a modified nucleotide sequence according to SEQ ID NO: 193;
[2270] (b) the sense strand comprises a modified nucleotide sequence according to SEQ ID NO: 290 and the antisense strand comprises a modified nucleotide sequence according to SEQ ID NO: 194;
[2271] (c) the sense strand comprises a modified nucleotide sequence according to SEQ ID NO: 291 and the antisense strand comprises a modified nucleotide sequence according to SEQ ID NO: 195;
[2272] (d) the sense strand comprises a modified nucleotide sequence according to SEQ ID NO: 292 and the antisense strand comprises a modified nucleotide sequence according to SEQ ID NO: 196;
[2273] (e) the sense strand comprises a modified nucleotide sequence according to SEQ ID NO: 293 and the antisense strand comprises a modified nucleotide sequence according to SEQ ID NO: 197;
[2274] (f) the sense strand comprises a modified nucleotide sequence according to SEQ ID NO: 294 and the antisense strand comprises a modified nucleotide sequence according to SEQ ID NO: 198;
[2275] (g) the sense strand comprises a modified nucleotide sequence according to SEQ ID NO: 295 and the antisense strand comprises a modified nucleotide sequence according to SEQ ID NO: 199;
[2276] (h) the sense strand comprises a modified nucleotide sequence according to SEQ ID NO: 296 and the antisense strand comprises a modified nucleotide sequence according to SEQ ID NO: 200;
[2277] (i) the sense strand comprises a modified nucleotide sequence according to SEQ ID NO: 297 and the antisense strand comprises a modified nucleotide sequence according to SEQ ID NO: 201;
[2278] (j) the sense strand comprises a modified nucleotide sequence according to SEQ ID NO: 298 and the antisense strand comprises a modified nucleotide sequence according to SEQ ID NO: 202;
[2279] (k) the sense strand comprises a modified nucleotide sequence according to SEQ ID NO: 299 and the antisense strand comprises a modified nucleotide sequence according to SEQ ID NO: 203;
[2280] (l) the sense strand comprises a modified nucleotide sequence according to SEQ ID NO: 300 and the antisense strand comprises a modified nucleotide sequence according to SEQ ID NO: 204;
[2281] (m) the sense strand comprises a modified nucleotide sequence according to SEQ ID NO: 301 and the antisense strand comprises a modified nucleotide sequence according to SEQ ID NO: 205;
[2282] (n) the sense strand comprises a modified nucleotide sequence according to SEQ ID NO: 302 and the antisense strand comprises a modified nucleotide sequence according to SEQ ID NO: 206;
[2283] (o) the sense strand comprises a modified nucleotide sequence according to SEQ ID NO: 303 and the antisense strand comprises a modified nucleotide sequence according to SEQ ID NO: 207;
[2284] (p) the sense strand comprises a modified nucleotide sequence according to SEQ ID NO: 304 and the antisense strand comprises a modified nucleotide sequence according to SEQ ID NO: 208;
[2285] (q) the sense strand comprises a modified nucleotide sequence according to SEQ ID NO: 305 and the antisense strand comprises a modified nucleotide sequence according to SEQ ID NO: 209;
[2286] (r) the sense strand comprises a modified nucleotide sequence according to SEQ ID NO: 306 and the antisense strand comprises a modified nucleotide sequence according to SEQ ID NO: 210;
[2287] (s) the sense strand comprises a modified nucleotide sequence according to SEQ ID NO: 307 and the antisense strand comprises a modified nucleotide sequence according to SEQ ID NO: 211;
[2288] (t) the sense strand comprises a modified nucleotide sequence according to SEQ ID NO: 308 and the antisense strand comprises a modified nucleotide sequence according to SEQ ID NO: 212;
[2289] (u) the sense strand comprises a modified nucleotide sequence according to SEQ ID NO: 309 and the antisense strand comprises a modified nucleotide sequence according to SEQ ID NO: 213;
[2290] (v) the sense strand comprises a modified nucleotide sequence according to SEQ ID NO: 310 and the antisense strand comprises a modified nucleotide sequence according to SEQ ID NO: 214;
[2291] (w) the sense strand comprises a modified nucleotide sequence according to SEQ ID NO: 311 and the antisense strand comprises a modified nucleotide sequence according to SEQ ID NO: 215;
[2292] (x) the sense strand comprises a modified nucleotide sequence according to SEQ ID NO: 312 and the antisense strand comprises a modified nucleotide sequence according to SEQ ID NO: 216;
[2293] (y) the sense strand comprises a modified nucleotide sequence according to SEQ ID NO: 313 and the antisense strand comprises a modified nucleotide sequence according to SEQ ID NO: 217;
[2294] (z) the sense strand comprises a modified nucleotide sequence according to SEQ ID NO: 314 and the antisense strand comprises a modified nucleotide sequence according to SEQ ID NO: 218;
[2295] (aa) the sense strand comprises a modified nucleotide sequence according to SEQ ID NO: 315 and the antisense strand comprises a modified nucleotide sequence according to SEQ ID NO: 219;
[2296] (bb) the sense strand comprises a modified nucleotide sequence according to SEQ ID NO: 316 and the antisense strand comprises a modified nucleotide sequence according to SEQ ID NO: 220;
[2297] (cc) the sense strand comprises a modified nucleotide sequence according to SEQ ID NO: 317 and the antisense strand comprises a modified nucleotide sequence according to SEQ ID NO: 221;
[2298] (dd) the sense strand comprises a modified nucleotide sequence according to SEQ ID NO: 318 and the antisense strand comprises a modified nucleotide sequence according to SEQ ID NO: 222;
[2299] (ee) the sense strand comprises a modified nucleotide sequence according to SEQ ID NO: 319 and the antisense strand comprises a modified nucleotide sequence according to SEQ ID NO: 223;
[2300] (ff) the sense strand comprises a modified nucleotide sequence according to SEQ ID NO: 320 and the antisense strand comprises a modified nucleotide sequence according to SEQ ID NO: 224;
[2301] (gg) the sense strand comprises a modified nucleotide sequence according to SEQ ID NO: 321 and the antisense strand comprises a modified nucleotide sequence according to SEQ ID NO: 225;
[2302] (hh) the sense strand comprises a modified nucleotide sequence according to SEQ ID NO: 322 and the antisense strand comprises a modified nucleotide sequence according to SEQ ID NO: 226;
[2303] (ii) the sense strand comprises a modified nucleotide sequence according to SEQ ID NO: 323 and the antisense strand comprises a modified nucleotide sequence according to SEQ ID NO: 227;
[2304] (jj) the sense strand comprises a modified nucleotide sequence according to SEQ ID NO: 324 and the antisense strand comprises a modified nucleotide sequence according to SEQ ID NO: 228;
[2305] (kk) the sense strand comprises a modified nucleotide sequence according to SEQ ID NO: 325 and the antisense strand comprises a modified nucleotide sequence according to SEQ ID NO: 229;
[2306] (ll) the sense strand comprises a modified nucleotide sequence according to SEQ ID NO: 326 and the antisense strand comprises a modified nucleotide sequence according to SEQ ID NO: 230;
[2307] (mm) the sense strand comprises a modified nucleotide sequence according to SEQ ID NO: 327 and the antisense strand comprises a modified nucleotide sequence according to SEQ ID NO: 231;
[2308] (nn) the sense strand comprises a modified nucleotide sequence according to SEQ ID NO: 328 and the antisense strand comprises a modified nucleotide sequence according to SEQ ID NO: 232;
[2309] (oo) the sense strand comprises a modified nucleotide sequence according to SEQ ID NO: 329 and the antisense strand comprises a modified nucleotide sequence according to SEQ ID NO: 233;
[2310] (pp) the sense strand comprises a modified nucleotide sequence according to SEQ ID NO: 330 and the antisense strand comprises a modified nucleotide sequence according to SEQ ID NO: 234;
[2311] (qq) the sense strand comprises a modified nucleotide sequence according to SEQ ID NO: 331 and the antisense strand comprises a modified nucleotide sequence according to SEQ ID NO: 235;
[2312] (rr) the sense strand comprises a modified nucleotide sequence according to SEQ ID NO: 332 and the antisense strand comprises a modified nucleotide sequence according to SEQ ID NO: 236;
[2313] (ss) the sense strand comprises a modified nucleotide sequence according to SEQ ID NO: 333 and the antisense strand comprises a modified nucleotide sequence according to SEQ ID NO: 237;
[2314] (tt) the sense strand comprises a modified nucleotide sequence according to SEQ ID NO: 334 and the antisense strand comprises a modified nucleotide sequence according to SEQ ID NO: 238;
[2315] (uu) the sense strand comprises a modified nucleotide sequence according to SEQ ID NO: 335 and the antisense strand comprises a modified nucleotide sequence according to SEQ ID NO: 239;
[2316] (vv) the sense strand comprises a modified nucleotide sequence according to SEQ ID NO: 336 and the antisense strand comprises a modified nucleotide sequence according to SEQ ID NO: 240;
[2317] (ww) the sense strand comprises a modified nucleotide sequence according to SEQ ID NO: 337 and the antisense strand comprises a modified nucleotide sequence according to SEQ ID NO: 241;
[2318] (xx) the sense strand comprises a modified nucleotide sequence according to SEQ ID NO: 338 and the antisense strand comprises a modified nucleotide sequence according to SEQ ID NO: 242;
[2319] (yy) the sense strand comprises a modified nucleotide sequence according to SEQ ID NO: 339 and the antisense strand comprises a modified nucleotide sequence according to SEQ ID NO: 243;
[2320] (zz) the sense strand comprises a modified nucleotide sequence according to SEQ ID NO: 340 and the antisense strand comprises a modified nucleotide sequence according to SEQ ID NO: 244;
[2321] (aaa) the sense strand comprises a modified nucleotide sequence according to SEQ ID NO: 341 and the antisense strand comprises a modified nucleotide sequence according to SEQ ID NO: 245;
[2322] (bbb) the sense strand comprises a modified nucleotide sequence according to SEQ ID NO: 342 and the antisense strand comprises a modified nucleotide sequence according to SEQ ID NO: 246;
[2323] (ccc) the sense strand comprises a modified nucleotide sequence according to SEQ ID NO: 343 and the antisense strand comprises a modified nucleotide sequence according to SEQ ID NO: 247;
[2324] (ddd) the sense strand comprises a modified nucleotide sequence according to SEQ ID NO: 344 and the antisense strand comprises a modified nucleotide sequence according to SEQ ID NO: 248;
[2325] (eee) the sense strand comprises a modified nucleotide sequence according to SEQ ID NO: 345 and the antisense strand comprises a modified nucleotide sequence according to SEQ ID NO: 249;
[2326] (fff) the sense strand comprises a modified nucleotide sequence according to SEQ ID NO: 346 and the antisense strand comprises a modified nucleotide sequence according to SEQ ID NO: 250;
[2327] (ggg) the sense strand comprises a modified nucleotide sequence according to SEQ ID NO: 347 and the antisense strand comprises a modified nucleotide sequence according to SEQ ID NO: 251;
[2328] (hhh) the sense strand comprises a modified nucleotide sequence according to SEQ ID NO: 348 and the antisense strand comprises a modified nucleotide sequence according to SEQ ID NO: 252;
[2329] (iii) the sense strand comprises a modified nucleotide sequence according to SEQ ID NO: 349 and the antisense strand comprises a modified nucleotide sequence according to SEQ ID NO: 253;
[2330] (jjj) the sense strand comprises a modified nucleotide sequence according to SEQ ID NO: 350 and the antisense strand comprises a modified nucleotide sequence according to SEQ ID NO: 254;
[2331] (kkk) the sense strand comprises a modified nucleotide sequence according to SEQ ID NO: 351 and the antisense strand comprises a modified nucleotide sequence according to SEQ ID NO: 255;
[2332] (lll) the sense strand comprises a modified nucleotide sequence according to SEQ ID NO: 352 and the antisense strand comprises a modified nucleotide sequence according to SEQ ID NO: 256;
[2333] (mmm) the sense strand comprises a modified nucleotide sequence according to SEQ ID NO: 353 and the antisense strand comprises a modified nucleotide sequence according to SEQ ID NO: 257;
[2334] (nnn) the sense strand comprises a modified nucleotide sequence according to SEQ ID NO: 354 and the antisense strand comprises a modified nucleotide sequence according to SEQ ID NO: 258;
[2335] (ooo) the sense strand comprises a modified nucleotide sequence according to SEQ ID NO: 355 and the antisense strand comprises a modified nucleotide sequence according to SEQ ID NO: 259;
[2336] (ppp) the sense strand comprises a modified nucleotide sequence according to SEQ ID NO: 356 and the antisense strand comprises a modified nucleotide sequence according to SEQ ID NO: 260;
[2337] (qqq) the sense strand comprises a modified nucleotide sequence according to SEQ ID NO: 357 and the antisense strand comprises a modified nucleotide sequence according to SEQ ID NO: 261;
[2338] (rrr) the sense strand comprises a modified nucleotide sequence according to SEQ ID NO: 358 and the antisense strand comprises a modified nucleotide sequence according to SEQ ID NO: 262;
[2339] (sss) the sense strand comprises a modified nucleotide sequence according to SEQ ID NO: 359 and the antisense strand comprises a modified nucleotide sequence according to SEQ ID NO: 263;
[2340] (ttt) the sense strand comprises a modified nucleotide sequence according to SEQ ID NO: 360 and the antisense strand comprises a modified nucleotide sequence according to SEQ ID NO: 264;
[2341] (uuu) the sense strand comprises a modified nucleotide sequence according to SEQ ID NO: 361 and the antisense strand comprises a modified nucleotide sequence according to SEQ ID NO: 265;
[2342] (vvv) the sense strand comprises a modified nucleotide sequence according to SEQ ID NO: 362 and the antisense strand comprises a modified nucleotide sequence according to SEQ ID NO: 266;
[2343] (www) the sense strand comprises a modified nucleotide sequence according to SEQ ID NO: 363 and the antisense strand comprises a modified nucleotide sequence according to SEQ ID NO: 267;
[2344] (xxx) the sense strand comprises a modified nucleotide sequence according to SEQ ID NO: 364 and the antisense strand comprises a modified nucleotide sequence according to SEQ ID NO: 268;
[2345] (yyy) the sense strand comprises a modified nucleotide sequence according to SEQ ID NO: 365 and the antisense strand comprises a modified nucleotide sequence according to SEQ ID NO: 269;
[2346] (zzz) the sense strand comprises a modified nucleotide sequence according to SEQ ID NO: 366 and the antisense strand comprises a modified nucleotide sequence according to SEQ ID NO: 270;
[2347] (aaaa) the sense strand comprises a modified nucleotide sequence according to SEQ ID NO: 367 and the antisense strand comprises a modified nucleotide sequence according to SEQ ID NO: 271;
[2348] (bbbb) the sense strand comprises a modified nucleotide sequence according to SEQ ID NO: 368 and the antisense strand comprises a modified nucleotide sequence according to SEQ ID NO: 272;
[2349] (cccc) the sense strand comprises a modified nucleotide sequence according to SEQ ID NO: 369 and the antisense strand comprises a modified nucleotide sequence according to SEQ ID NO: 273;
[2350] (dddd) the sense strand comprises a modified nucleotide sequence according to SEQ ID NO: 370 and the antisense strand comprises a modified nucleotide sequence according to SEQ ID NO: 274;
[2351] (eeee) the sense strand comprises a modified nucleotide sequence according to SEQ ID NO: 371 and the antisense strand comprises a modified nucleotide sequence according to SEQ ID NO: 275;
[2352] (ffff) the sense strand comprises a modified nucleotide sequence according to SEQ ID NO: 372 and the antisense strand comprises a modified nucleotide sequence according to SEQ ID NO: 276;
[2353] (gggg) the sense strand comprises a modified nucleotide sequence according to SEQ ID NO: 373 and the antisense strand comprises a modified nucleotide sequence according to SEQ ID NO: 277;
[2354] (hhhh) the sense strand comprises a modified nucleotide sequence according to SEQ ID NO: 374 and the antisense strand comprises a modified nucleotide sequence according to SEQ ID NO: 278;
[2355] (iiii) the sense strand comprises a modified nucleotide sequence according to SEQ ID NO: 375 and the antisense strand comprises a modified nucleotide sequence according to SEQ ID NO: 279;
[2356] (jjjj) the sense strand comprises a modified nucleotide sequence according to SEQ ID NO: 376 and the antisense strand comprises a modified nucleotide sequence according to SEQ ID NO: 280;
[2357] (kkkk) the sense strand comprises a modified nucleotide sequence according to SEQ ID NO: 377 and the antisense strand comprises a modified nucleotide sequence according to SEQ ID NO: 281;
[2358] (llll) the sense strand comprises a modified nucleotide sequence according to SEQ ID NO: 378 and the antisense strand comprises a modified nucleotide sequence according to SEQ ID NO: 282;
[2359] (mmmm) the sense strand comprises a modified nucleotide sequence according to SEQ ID NO: 379 and the antisense strand comprises a modified nucleotide sequence according to SEQ ID NO: 283;
[2360] (nnnn) the sense strand comprises a modified nucleotide sequence according to SEQ ID NO: 380 and the antisense strand comprises a modified nucleotide sequence according to SEQ ID NO: 284;
[2361] (oooo) the sense strand comprises a modified nucleotide sequence according to SEQ ID NO: 381 and the antisense strand comprises a modified nucleotide sequence according to SEQ ID NO: 285;
[2362] (pppp) the sense strand comprises a modified nucleotide sequence according to SEQ ID NO: 382 and the antisense strand comprises a modified nucleotide sequence according to SEQ ID NO: 286;
[2363] (qqqq) the sense strand comprises a modified nucleotide sequence according to SEQ ID NO: 383 and the antisense strand comprises a modified nucleotide sequence according to SEQ ID NO: 287;
[2364] (rrrr) the sense strand comprises a modified nucleotide sequence according to SEQ ID NO: 384 and the antisense strand comprises a modified nucleotide sequence according to SEQ ID NO: 288;
[2365] (ssss) the sense strand comprises a modified nucleotide sequence according to SEQ ID NO: 385 and the antisense strand comprises a modified nucleotide sequence according to SEQ ID NO: 193;
[2366] (tttt) the sense strand comprises a modified nucleotide sequence according to SEQ ID NO: 386 and the antisense strand comprises a modified nucleotide sequence according to SEQ ID NO: 194;
[2367] (uuuu) the sense strand comprises a modified nucleotide sequence according to SEQ ID NO: 387 and the antisense strand comprises a modified nucleotide sequence according to SEQ ID NO: 195;
[2368] (vvvv) the sense strand comprises a modified nucleotide sequence according to SEQ ID NO: 388 and the antisense strand comprises a modified nucleotide sequence according to SEQ ID NO: 196;
[2369] (wwww) the sense strand comprises a modified nucleotide sequence according to SEQ ID NO: 389 and the antisense strand comprises a modified nucleotide sequence according to SEQ ID NO: 197;
[2370] (xxxx) the sense strand comprises a modified nucleotide sequence according to SEQ ID NO: 390 and the antisense strand comprises a modified nucleotide sequence according to SEQ ID NO: 198;
[2371] (yyyy) the sense strand comprises a modified nucleotide sequence according to SEQ ID NO: 391 and the antisense strand comprises a modified nucleotide sequence according to SEQ ID NO: 199;
[2372] (zzzz) the sense strand comprises a modified nucleotide sequence according to SEQ ID NO: 392 and the antisense strand comprises a modified nucleotide sequence according to SEQ ID NO: 200;
[2373] (aaaaa) the sense strand comprises a modified nucleotide sequence according to SEQ ID NO: 393 and the antisense strand comprises a modified nucleotide sequence according to SEQ ID NO: 201;
[2374] (bbbbb) the sense strand comprises a modified nucleotide sequence according to SEQ ID NO: 394 and the antisense strand comprises a modified nucleotide sequence according to SEQ ID NO: 202;
[2375] (ccccc) the sense strand comprises a modified nucleotide sequence according to SEQ ID NO: 395 and the antisense strand comprises a modified nucleotide sequence according to SEQ ID NO: 203;
[2376] (ddddd) the sense strand comprises a modified nucleotide sequence according to SE Q ID NO: 396 and the antisense strand comprises a modified nucleotide sequence according to SEQ ID NO: 204;
[2377] (eeeee) the sense strand comprises a modified nucleotide sequence according to SEQ ID NO: 397 and the antisense strand comprises a modified nucleotide sequence according to SEQ ID NO: 205;
[2378] (fffff) the sense strand comprises a modified nucleotide sequence according to SEQ ID NO: 398 and the antisense strand comprises a modified nucleotide sequence according to SEQ ID NO: 206;
[2379] (ggggg) the sense strand comprises a modified nucleotide sequence according to SEQ ID NO: 399 and the antisense strand comprises a modified nucleotide sequence according to SEQ ID NO: 207;
[2380] (hhhhh) the sense strand comprises a modified nucleotide sequence according to SEQ ID NO: 400 and the antisense strand comprises a modified nucleotide sequence according to SEQ ID NO: 208;
[2381] (iiiii) the sense strand comprises a modified nucleotide sequence according to SEQ ID NO: 401 and the antisense strand comprises a modified nucleotide sequence according to SEQ ID NO: 209;
[2382] (jjjjj) the sense strand comprises a modified nucleotide sequence according to SEQ ID NO: 402 and the antisense strand comprises a modified nucleotide sequence according to SEQ ID NO: 210;
[2383] (kkkkk) the sense strand comprises a modified nucleotide sequence according to SEQ ID NO: 403 and the antisense strand comprises a modified nucleotide sequence according to SEQ ID NO: 211;
[2384] (lllll) the sense strand comprises a modified nucleotide sequence according to SEQ ID NO: 404 and the antisense strand comprises a modified nucleotide sequence according to SEQ ID NO: 212;
[2385] (mmmmm) the sense strand comprises a modified nucleotide sequence according to SEQ ID NO: 405 and the antisense strand comprises a modified nucleotide sequence according to SEQ ID NO: 213;
[2386] (nnnnn) the sense strand comprises a modified nucleotide sequence according to SEQ ID NO: 406 and the antisense strand comprises a modified nucleotide sequence according to SEQ ID NO: 214;
[2387] (ooooo) the sense strand comprises a modified nucleotide sequence according to SEQ ID NO: 407 and the antisense strand comprises a modified nucleotide sequence according to SEQ ID NO: 215;
[2388] (ppppp) the sense strand comprises a modified nucleotide sequence according to SEQ ID NO: 408 and the antisense strand comprises a modified nucleotide sequence according to SEQ ID NO: 216;
[2389] (qqqqq) the sense strand comprises a modified nucleotide sequence according to SEQ ID NO: 409 and the antisense strand comprises a modified nucleotide sequence according to SEQ ID NO: 217;
[2390] (rrrrr) the sense strand comprises a modified nucleotide sequence according to SEQ ID NO: 410 and the antisense strand comprises a modified nucleotide sequence according to SEQ ID NO: 218;
[2391] (sssss) the sense strand comprises a modified nucleotide sequence according to SEQ ID NO: 411 and the antisense strand comprises a modified nucleotide sequence according to SEQ ID NO: 219;
[2392] (ttttt) the sense strand comprises a modified nucleotide sequence according to SEQ ID NO: 412 and the antisense strand comprises a modified nucleotide sequence according to SEQ ID NO: 220;
[2393] (uuuuu) the sense strand comprises a modified nucleotide sequence according to SEQ ID NO: 413 and the antisense strand comprises a modified nucleotide sequence according to SEQ ID NO: 221;
[2394] (vvvvv) the sense strand comprises a modified nucleotide sequence according to SEQ ID NO: 414 and the antisense strand comprises a modified nucleotide sequence according to SEQ ID NO: 222;
[2395] (wwwww) the sense strand comprises a modified nucleotide sequence according to SEQ ID NO: 415 and the antisense strand comprises a modified nucleotide sequence according to SEQ ID NO: 223;
[2396] (xxxxx) the sense strand comprises a modified nucleotide sequence according to SEQ ID NO: 416 and the antisense strand comprises a modified nucleotide sequence according to SEQ ID NO: 224;
[2397] (yyyyy) the sense strand comprises a modified nucleotide sequence according to SEQ ID NO: 417 and the antisense strand comprises a modified nucleotide sequence according to SEQ ID NO: 225;
[2398] (zzzzz) the sense strand comprises a modified nucleotide sequence according to SEQ ID NO: 418 and the antisense strand comprises a modified nucleotide sequence according to SEQ ID NO: 226;
[2399] (aaaaaa) the sense strand comprises a modified nucleotide sequence according to SEQ ID NO: 419 and the antisense strand comprises a modified nucleotide sequence according to SEQ ID NO: 227;
[2400] (bbbbbb) the sense strand comprises a modified nucleotide sequence according to SEQ ID NO: 420 and the antisense strand comprises a modified nucleotide sequence according to SEQ ID NO: 228;
[2401] (cccccc) the sense strand comprises a modified nucleotide sequence according to SEQ ID NO: 421 and the antisense strand comprises a modified nucleotide sequence according to SEQ ID NO: 229;
[2402] (dddddd) the sense strand comprises a modified nucleotide sequence according to SEQ ID NO: 422 and the antisense strand comprises a modified nucleotide sequence according to SEQ ID NO: 230;
[2403] (eeeeee) the sense strand comprises a modified nucleotide sequence according to SEQ ID NO: 423 and the antisense strand comprises a modified nucleotide sequence according to SEQ ID NO: 231;
[2404] (ffffff) the sense strand comprises a modified nucleotide sequence according to SEQ ID NO: 424 and the antisense strand comprises a modified nucleotide sequence according to SEQ ID NO: 232;
[2405] (gggggg) the sense strand comprises a modified nucleotide sequence according to SEQ ID NO: 425 and the antisense strand comprises a modified nucleotide sequence according to SEQ ID NO: 233;
[2406] (hhhhhh) the sense strand comprises a modified nucleotide sequence according to SEQ ID NO: 426 and the antisense strand comprises a modified nucleotide sequence according to SEQ ID NO: 234;
[2407] (iiiiii) the sense strand comprises a modified nucleotide sequence according to SEQ ID NO: 427 and the antisense strand comprises a modified nucleotide sequence according to SEQ ID NO: 235;
[2408] (jjjjjj) the sense strand comprises a modified nucleotide sequence according to SEQ ID NO: 428 and the antisense strand comprises a modified nucleotide sequence according to SEQ ID NO: 236;
[2409] (kkkkkk) the sense strand comprises a modified nucleotide sequence according to SEQ ID NO: 429 and the antisense strand comprises a modified nucleotide sequence according to SEQ ID NO: 237;
[2410] (llllll) the sense strand comprises a modified nucleotide sequence according to SEQ ID NO: 430 and the antisense strand comprises a modified nucleotide sequence according to SEQ ID NO: 238;
[2411] (mmmmmm) the sense strand comprises a modified nucleotide sequence according to SEQ ID NO: 431 and the antisense strand comprises a modified nucleotide sequence according to SEQ ID NO: 239;
[2412] (nnnnnn) the sense strand comprises a modified nucleotide sequence according to SEQ ID NO: 432 and the antisense strand comprises a modified nucleotide sequence according to SEQ ID NO: 240;
[2413] (oooooo) the sense strand comprises a modified nucleotide sequence according to SEQ ID NO: 433 and the antisense strand comprises a modified nucleotide sequence according to SEQ ID NO: 241;
[2414] (pppppp) the sense strand comprises a modified nucleotide sequence according to SEQ ID NO: 434 and the antisense strand comprises a modified nucleotide sequence according to SEQ ID NO: 242;
[2415] (qqqqqq) the sense strand comprises a modified nucleotide sequence according to SEQ ID NO: 435 and the antisense strand comprises a modified nucleotide sequence according to SEQ ID NO: 243;
[2416] (rrrrrr) the sense strand comprises a modified nucleotide sequence according to SEQ ID NO: 436 and the antisense strand comprises a modified nucleotide sequence according to SEQ ID NO: 244;
[2417] (ssssss) the sense strand comprises a modified nucleotide sequence according to SEQ ID NO: 437 and the antisense strand comprises a modified nucleotide sequence according to SEQ ID NO: 245;
[2418] (tttttt) the sense strand comprises a modified nucleotide sequence according to SEQ ID NO: 438 and the antisense strand comprises a modified nucleotide sequence according to SEQ ID NO: 246;
[2419] (uuuuuu) the sense strand comprises a modified nucleotide sequence according to SEQ ID NO: 439 and the antisense strand comprises a modified nucleotide sequence according to SEQ ID NO: 247;
[2420] (vvvvvv) the sense strand comprises a modified nucleotide sequence according to SEQ ID NO: 440 and the antisense strand comprises a modified nucleotide sequence according to SEQ ID NO: 248;
[2421] (wwwwww) the sense strand comprises a modified nucleotide sequence according to SEQ ID NO: 441 and the antisense strand comprises a modified nucleotide sequence according to SEQ ID NO: 249;
[2422] (xxxxxx) the sense strand comprises a modified nucleotide sequence according to SEQ ID NO: 442 and the antisense strand comprises a modified nucleotide sequence according to SEQ ID NO: 250;
[2423] (yyyyyy) the sense strand comprises a modified nucleotide sequence according to SEQ ID NO: 443 and the antisense strand comprises a modified nucleotide sequence according to SEQ ID NO: 251;
[2424] (zzzzzz) the sense strand comprises a modified nucleotide sequence according to SEQ ID NO: 444 and the antisense strand comprises a modified nucleotide sequence according to SEQ ID NO: 252;
[2425] (aaaaaaa) the sense strand comprises a modified nucleotide sequence according to SEQ ID NO: 445 and the antisense strand comprises a modified nucleotide sequence according to SEQ ID NO: 253;
[2426] (bbbbbbb) the sense strand comprises a modified nucleotide sequence according to SEQ ID NO: 446 and the antisense strand comprises a modified nucleotide sequence according to SEQ ID NO: 254;
[2427] (ccccccc) the sense strand comprises a modified nucleotide sequence according to SEQ ID NO: 447 and the antisense strand comprises a modified nucleotide sequence according to SEQ ID NO: 255;
[2428] (ddddddd) the sense strand comprises a modified nucleotide sequence according to SEQ ID NO: 448 and the antisense strand comprises a modified nucleotide sequence according to SEQ ID NO: 256;
[2429] (eeeeeee) the sense strand comprises a modified nucleotide sequence according to SEQ ID NO: 449 and the antisense strand comprises a modified nucleotide sequence according to SEQ ID NO: 257;
[2430] (fffffff) the sense strand comprises a modified nucleotide sequence according to SEQ ID NO: 450 and the antisense strand comprises a modified nucleotide sequence according to SEQ ID NO: 258;
[2431] (ggggggg) the sense strand comprises a modified nucleotide sequence according to SEQ ID NO: 451 and the antisense strand comprises a modified nucleotide sequence according to SEQ ID NO: 259;
[2432] (hhhhhhh) the sense strand comprises a modified nucleotide sequence according to SEQ ID NO: 452 and the antisense strand comprises a modified nucleotide sequence according to SEQ ID NO: 260;
[2433] (iiiiii) the sense strand comprises a modified nucleotide sequence according to SEQ ID NO: 453 and the antisense strand comprises a modified nucleotide sequence according to SEQ ID NO: 261;
[2434] (jjjjjjj) the sense strand comprises a modified nucleotide sequence according to SEQ ID NO: 454 and the antisense strand comprises a modified nucleotide sequence according to SEQ ID NO: 262;
[2435] (kkkkkkk) the sense strand comprises a modified nucleotide sequence according to SEQ ID NO: 455 and the antisense strand comprises a modified nucleotide sequence according to SEQ ID NO: 263;
[2436] (lllllll) the sense strand comprises a modified nucleotide sequence according to SEQ ID NO: 456 and the antisense strand comprises a modified nucleotide sequence according to SEQ ID NO: 264;
[2437] (mmmmmmm) the sense strand comprises a modified nucleotide sequence according to SEQ ID NO: 457 and the antisense strand comprises a modified nucleotide sequence according to SEQ ID NO: 265;
[2438] (nnnnnnn) the sense strand comprises a modified nucleotide sequence according to SEQ ID NO: 458 and the antisense strand comprises a modified nucleotide sequence according to SEQ ID NO: 266;
[2439] (ooooooo) the sense strand comprises a modified nucleotide sequence according to SEQ ID NO: 459 and the antisense strand comprises a modified nucleotide sequence according to SEQ ID NO: 267;
[2440] (ppppppp) the sense strand comprises a modified nucleotide sequence according to SEQ ID NO: 460 and the antisense strand comprises a modified nucleotide sequence according to SEQ ID NO: 268;
[2441] (qqqqqqq) the sense strand comprises a modified nucleotide sequence according to SEQ ID NO: 461 and the antisense strand comprises a modified nucleotide sequence according to SEQ ID NO: 269;
[2442] (rrrrrrrr) the sense strand comprises a modified nucleotide sequence according to SEQ ID NO: 462 and the antisense strand comprises a modified nucleotide sequence according to SEQ ID NO: 270;
[2443] (sssssss) the sense strand comprises a modified nucleotide sequence according to SEQ ID NO: 463 and the antisense strand comprises a modified nucleotide sequence according to SEQ ID NO: 271;
[2444] (ttttttt) the sense strand comprises a modified nucleotide sequence according to SEQ ID NO: 464 and the antisense strand comprises a modified nucleotide sequence according to SEQ ID NO: 272;
[2445] (uuuuuuu) the sense strand comprises a modified nucleotide sequence according to SEQ ID NO: 465 and the antisense strand comprises a modified nucleotide sequence according to SEQ ID NO: 273;
[2446] (vvvvvvv) the sense strand comprises a modified nucleotide sequence according to SEQ ID NO: 466 and the antisense strand comprises a modified nucleotide sequence according to SEQ ID NO: 274;
[2447] (wwwwwww) the sense strand comprises a modified nucleotide sequence according to SEQ ID NO: 467 and the antisense strand comprises a modified nucleotide sequence according to SEQ ID NO: 275;
[2448] (xxxxxxx) the sense strand comprises a modified nucleotide sequence according to SEQ ID NO: 468 and the antisense strand comprises a modified nucleotide sequence according to SEQ ID NO: 276;
[2449] (yyyyyyy) the sense strand comprises a modified nucleotide sequence according to SEQ ID NO: 469 and the antisense strand comprises a modified nucleotide sequence according to SEQ ID NO: 277;
[2450] (zzzzzzz) the sense strand comprises a modified nucleotide sequence according to SEQ ID NO: 470 and the antisense strand comprises a modified nucleotide sequence according to SEQ ID NO: 278;
[2451] (aaaaaaaa) the sense strand comprises a modified nucleotide sequence according to SEQ ID NO: 471 and the antisense strand comprises a modified nucleotide sequence according to SEQ ID NO: 279;
[2452] (bbbbbbbb) the sense strand comprises a modified nucleotide sequence according to SEQ ID NO: 472 and the antisense strand comprises a modified nucleotide sequence according to SEQ ID NO: 280;
[2453] (cccccccc) the sense strand comprises a modified nucleotide sequence according to SEQ ID NO: 473 and the antisense strand comprises a modified nucleotide sequence according to SEQ ID NO: 281;
[2454] (dddddddd) the sense strand comprises a modified nucleotide sequence according to SEQ ID NO: 474 and the antisense strand comprises a modified nucleotide sequence according to SEQ ID NO: 282;
[2455] (eeeeeeee) the sense strand comprises a modified nucleotide sequence according to SEQ ID NO: 475 and the antisense strand comprises a modified nucleotide sequence according to SEQ ID NO: 283;
[2456] (ffffffff) the sense strand comprises a modified nucleotide sequence according to SEQ ID NO: 476 and the antisense strand comprises a modified nucleotide sequence according to SEQ ID NO: 284;
[2457] (gggggggg) the sense strand comprises a modified nucleotide sequence according to SEQ ID NO: 477 and the antisense strand comprises a modified nucleotide sequence according to SEQ ID NO: 285;
[2458] (hhhhhhhh) the sense strand comprises a modified nucleotide sequence according to SEQ ID NO: 478 and the antisense strand comprises a modified nucleotide sequence according to SEQ ID NO: 286;
[2459] (iiiiiii) the sense strand comprises a modified nucleotide sequence according to SEQ ID NO: 479 and the antisense strand comprises a modified nucleotide sequence according to SEQ ID NO: 287; or
[2460] (jjjjjjjj) the sense strand comprises a modified nucleotide sequence according to SEQ ID NO: 480 and the antisense strand comprises a modified nucleotide sequence according to SEQ ID NO: 288.

[2461] Embodiment 179. The method or use of embodiment 178, wherein:
[2462] (a) the sense strand comprises a modified nucleobase sequence according to SEQ ID NO: 296 and the antisense strand comprises a modified nucleobase sequence according to SEQ ID NO: 200;
[2463] (b) the sense strand comprises a modified nucleobase sequence according to SEQ ID NO: 299 and the antisense strand comprises a modified nucleobase sequence according to SEQ ID NO: 203;
[2464] (c) the sense strand comprises a modified nucleobase sequence according to SEQ ID NO: 302 and the antisense strand comprises a modified nucleobase sequence according to SEQ ID NO: 206;
[2465] (d) the sense strand comprises a modified nucleobase sequence according to SEQ ID NO: 304 and the antisense strand comprises a modified nucleobase sequence according to SEQ ID NO: 208;
[2466] (e) the sense strand comprises a modified nucleobase sequence according to SEQ ID NO: 323 and the antisense strand comprises a modified nucleobase sequence according to SEQ ID NO: 227;
[2467] (f) the sense strand comprises a modified nucleobase sequence according to SEQ ID NO: 324 and the antisense strand comprises a modified nucleobase sequence according to SEQ ID NO: 228;
[2468] (g) the sense strand comprises a modified nucleobase sequence according to SEQ ID NO: 326 and the antisense strand comprises a modified nucleobase sequence according to SEQ ID NO: 230;
[2469] (h) the sense strand comprises a modified nucleobase sequence according to SEQ ID NO: 327 and the antisense strand comprises a modified nucleobase sequence according to SEQ ID NO: 231;
[2470] (i) the sense strand comprises a modified nucleobase sequence according to SEQ ID NO: 329 and the antisense strand comprises a modified nucleobase sequence according to SEQ ID NO: 233;
[2471] (j) the sense strand comprises a modified nucleobase sequence according to SEQ ID NO: 330 and the antisense strand comprises a modified nucleobase sequence according to SEQ ID NO: 234;
[2472] (k) the sense strand comprises a modified nucleobase sequence according to SEQ ID NO: 340 and the antisense strand comprises a modified nucleobase sequence according to SEQ ID NO: 244;
[2473] (l) the sense strand comprises a modified nucleobase sequence according to SEQ ID NO: 365 and the antisense strand comprises a modified nucleobase sequence according to SEQ ID NO: 269;
[2474] (m) the sense strand comprises a modified nucleobase sequence according to SEQ ID NO: 372 and the antisense strand comprises a modified nucleobase sequence according to SEQ ID NO: 276;
[2475] (n) the sense strand comprises a modified nucleobase sequence according to SEQ ID NO: 374 and the antisense strand comprises a modified nucleobase sequence according to SEQ ID NO: 278;
[2476] (o) the sense strand comprises a modified nucleobase sequence according to SEQ ID NO: 375 and the antisense strand comprises a modified nucleobase sequence according to SEQ ID NO: 279;
[2477] (p) the sense strand comprises a modified nucleobase sequence according to SEQ ID NO: 376 and the antisense strand comprises a modified nucleobase sequence according to SEQ ID NO: 280;
[2478] (q) the sense strand comprises a modified nucleobase sequence according to SEQ ID NO: 377 and the antisense strand comprises a modified nucleobase sequence according to SEQ ID NO: 281;
[2479] (r) the sense strand comprises a modified nucleobase sequence according to SEQ ID NO: 378 and the antisense strand comprises a modified nucleobase sequence according to SEQ ID NO: 282;
[2480] (s) the sense strand comprises a modified nucleobase sequence according to SEQ ID NO: 381 and the antisense strand comprises a modified nucleobase sequence according to SEQ ID NO: 285;
[2481] (t) the sense strand comprises a modified nucleobase sequence according to SEQ ID NO: 392 and the antisense strand comprises a modified nucleobase sequence according to SEQ ID NO: 200;
[2482] (u) the sense strand comprises a modified nucleobase sequence according to SEQ ID NO: 395 and the antisense strand comprises a modified nucleobase sequence according to SEQ ID NO: 203;
[2483] (v) the sense strand comprises a modified nucleobase sequence according to SEQ ID NO: 398 and the antisense strand comprises a modified nucleobase sequence according to SEQ ID NO: 206;
[2484] (w) the sense strand comprises a modified nucleobase sequence according to SEQ ID NO: 400 and the antisense strand comprises a modified nucleobase sequence according to SEQ ID NO: 208;
[2485] (x) the sense strand comprises a modified nucleobase sequence according to SEQ ID NO: 419 and the antisense strand comprises a modified nucleobase sequence according to SEQ ID NO: 227;
[2486] (y) the sense strand comprises a modified nucleobase sequence according to SEQ ID NO: 420 and the antisense strand comprises a modified nucleobase sequence according to SEQ ID NO: 228;
[2487] (z) the sense strand comprises a modified nucleobase sequence according to SEQ ID NO: 422 and the antisense strand comprises a modified nucleobase sequence according to SEQ ID NO: 230;
[2488] (aa) the sense strand comprises a modified nucleobase sequence according to SEQ ID NO: 423 and the antisense strand comprises a modified nucleobase sequence according to SEQ ID NO: 231;
[2489] (bb) the sense strand comprises a modified nucleobase sequence according to SEQ ID NO: 425 and the antisense strand comprises a modified nucleobase sequence according to SEQ ID NO: 233;
[2490] (cc) the sense strand comprises a modified nucleobase sequence according to SEQ ID NO: 426 and the antisense strand comprises a modified nucleobase sequence according to SEQ ID NO: 234;
[2491] (dd) the sense strand comprises a modified nucleobase sequence according to SEQ ID NO: 436 and the antisense strand comprises a modified nucleobase sequence according to SEQ ID NO: 244;
[2492] (ee) the sense strand comprises a modified nucleobase sequence according to SEQ ID NO: 461 and the antisense strand comprises a modified nucleobase sequence according to SEQ ID NO: 269;
[2493] (ff) the sense strand comprises a modified nucleobase sequence according to SEQ ID NO: 468 and the antisense strand comprises a modified nucleobase sequence according to SEQ ID NO: 276;
[2494] (gg) the sense strand comprises a modified nucleobase sequence according to SEQ ID NO: 470 and the antisense strand comprises a modified nucleobase sequence according to SEQ ID NO: 278;
[2495] (hh) the sense strand comprises a modified nucleobase sequence according to SEQ ID NO: 471 and the antisense strand comprises a modified nucleobase sequence according to SEQ ID NO: 279;
[2496] (ii) the sense strand comprises a modified nucleobase sequence according to SEQ ID NO: 472 and the antisense strand comprises a modified nucleobase sequence according to SEQ ID NO: 280;
[2497] (jj) the sense strand comprises a modified nucleobase sequence according to SEQ ID NO: 473 and the antisense strand comprises a modified nucleobase sequence according to SEQ ID NO: 281;
[2498] (kk) the sense strand comprises a modified nucleobase sequence according to SEQ ID NO: 474 and the antisense strand comprises a modified nucleobase sequence according to SEQ ID NO: 282; or
[2499] (ll) the sense strand comprises a modified nucleobase sequence according to SEQ ID NO: 477 and the antisense strand comprises a modified nucleobase sequence according to SEQ ID NO: 285.

[2500] Embodiment 180. The method or use of embodiment 179, wherein the RNAi agent comprises a targeting ligand comprising a structure according to Formula I:

[chemical structure]

[2501] wherein R is a linker conjugated to the wherein the targeting ligand is conjugated to the 3′ end of the sense strand, wherein R comprises a structure according to Formula III:

[chemical structure]

[2502] and wherein connection point C of Formula III is conjugated to Formula I, and connection point D of Formula III is conjugated to the 3′ end of the sense strand.

[2503] Embodiment 181. The method or use of any one of embodiments 126-178, wherein the sense strand comprises a 3′ overhang of 1-5 nucleotides in length.

[2504] Embodiment 182. The method or use of any one of embodiments 126-178 and 181, wherein the sense strand comprises a 5′ overhang of 1-5 nucleotides in length.

[2505] Embodiment 183. The method or use of any one of embodiments 126-178, wherein the antisense strand comprises a 3′ overhang of 1-5 nucleotides in length.

[2506] Embodiment 184. The method or use of any one of embodiments 126-178 and 183, wherein the antisense strand comprises a 5′ overhang of 1-5 nucleotides in length.

[2507] Embodiment 185. The method or use of any one of embodiments 126-184, wherein the sense strand or the antisense strand comprises at least one modified nucleotide or at least one modified internucleoside linkage.

[2508] Embodiment 186. The method or use of embodiment 185, wherein the sense strand and or the antisense strand comprises a modified internucleoside linkage at a first, second, penultimate, or final internucleoside linkage position.

[2509] Embodiment 187. The method or use of embodiment 185 or 186, wherein the at least one modified nucleotide or at least one modified internucleoside linkage comprises a 2′-O-methyl modified nucleotide, a nucleotide comprising a 5′-phosphorothioate group, a 2′-deoxy-2′-fluoro modified nucleotide, a 2′-deoxy-modified nucleotide, a locked nucleotide, an abasic nucleotide, deoxythymidine, an inverted deoxythymidine, a 2′-amino-modified nucleotide, a 2′-alkyl-modified nucleotide, a morpholino nucleotide, a phosphoramidate, or a non-natural base comprising nucleotide.

[2510] Embodiment 188. The method or use of any one of embodiments 139-178 and 181-187, wherein the targeting ligand is conjugated to the sense strand.

[2511] Embodiment 189. The method or use of embodiment 188, wherein the targeting ligand is conjugated to the 3′ end of the sense strand.

[2512] Embodiment 190. The method or use of embodiment 188, wherein the targeting ligand is conjugated to the 5′ end of the sense strand.

[2513] Embodiment 191. The method or use of any one of embodiments 139-178 and 181-186, wherein the targeting ligand is conjugated to the antisense strand.

[2514] Embodiment 192. The method or use of embodiment 191, wherein the targeting ligand is conjugated to the 3′ end of the antisense strand.

[2515] Embodiment 193. The method or use of embodiment 191, wherein the targeting ligand is conjugated to the 5′ end of the antisense strand.

[2516] Embodiment 194. The method or use of any one of embodiments 139-178 and 181-193, wherein the targeting ligand comprises a galactose trimer.

[2517] Embodiment 195. The method or use of any one of embodiments 139-178 and 181-194, wherein the targeting ligand comprises N-acetylgalactosamine (GalNAc).

[2518] Embodiment 196. The method or use of any one of embodiments 139-178 and 181-195, wherein the targeting ligand comprises a structure according to Formula I:

[chemical structure]

wherein R is:
[2519] (i) the sense strand or the antisense strand; or
[2520] (ii) a linker conjugated to the sense strand or the antisense strand.

[2521] Embodiment 197. The method or use of embodiment 196, wherein R is a linker conjugated to the sense strand or the antisense strand having a structure according to Formula III:

[chemical structure]

wherein:
[2522] (i) connection point C of Formula III is conjugated to Formula I, and connection point D of Formula III is conjugated to the sense strand or the antisense strand; or
[2523] (ii) connection point C of Formula III is conjugated to Formula I, and connection point D of Formula III is conjugated to a phosphate group which is conjugated to the sense strand or the antisense strand.

[2524] Embodiment 198. The method or use of embodiment 197, wherein Formula III or the phosphate group is conjugated to the 3′ end or the 5′ end of the sense strand or the antisense strand.

[2525] Embodiment 199. The method or use of embodiment 197, wherein Formula III or the phosphate group is conjugated to an internal nucleotide or nucleoside base of the sense strand or the antisense strand.

[2526] Embodiment 200. The method or use of any one of embodiments 139-178 and 181-195, wherein the RNAi agent comprises a targeting ligand and linker according to Formula V:

[chemical structure]

[2527] Embodiment 201. The method or use of any one of embodiments 126-200, wherein the RNAi agent is an siRNA molecule.

[2528] Embodiment 202. The method or use of any one of embodiments 126-200, wherein the RNAi agent is an shRNA molecule.

[2529] Embodiment 203. A method of producing the RNAi agent according to any one of embodiments 1-78, comprising annealing together the sense strand and the antisense strand.

[2530] Embodiment 204. The method or use of embodiment 203, comprising synthesizing the antisense strand and/or the sense strand.

### EXAMPLES

[2531] The following examples are included for illustrative purposes only and are not intended to limit the scope of the invention.

### Example 1: Bioinformatic Based in Silico Design of siRNA Screening Set

[2532] In silico modeling enabled identification and selection of siRNA constructs that target human GCK. The selected siRNA candidates were also screened in silico for potential off-target reactivity and cross-reactivity including in human, cynomolgus monkey, rhesus monkey, mouse, and rat. The bioinformatic off-target prediction assumed a canonical 19mer dsRNA structure. Positions 2-18 (5′ to 3′) of the sense and antisense strand were used for specificity calculations and positions 2-7 (5′ to 3′) were used for seed region analysis. Positions 1-19 (5′ to 3′) and positions 1-21 (5′ to 3′) of the antisense strand were used for cross-reactivity and human SN P analysis. All relevant sequences that target GCK mRNA were identified and assembled in silico. Further cross-reactivity for human, cynomolgus monkey, rhesus monkey mouse, and rat analysis was conducted using all 19 basis or positions 2-18 of the sense strand, and all 21 bases or positions 2-20 of the antisense strand. Sense strands and antisense strands were analyzed separately.

[2533] For each candidate siRNA, the off-target frequency, classified by mismatch number, was calculated. The identity between seed region siRNA candidates and the seed region of known miRNAs was investigated to exclude siRNA candidates having identical seed regions to known miRNAs.

[2534] The siRNA candidates were analyzed against the N CBI SN P database to identify siRNAs targeting regions with known SNPs. A total of 96 candidate siRNAs were selected based on the analysis. See duplexes including sense and antisense sequences in Table 3.

[2535] The 96 candidate siRNAs identified according to the method described in Example 1 are synthesized on approximately 0.2 μmol scale and purified using H PLC. Synthesized siRNA duplexes will include 2′-fluoro and 2′-O-methyl-residues as well as phosphorothioate linkages at selected positions. See duplexes to include modified sense and antisense sequences in Table 3.

### Example 2: In Vitro Screening of RNAi Agents

[2536] This Example describes in vitro siRNA screening of selected GCK RNAi agents for their ability to inhibit GCK expression GCK gene expression knockdown following GCK RNAi agent transfection was determined by qPCR.

[2537] Briefly, CaSki or NHPPH cells were transfected with either 20 nM or 2 nM of one of the GCK RNAi agents provided in Table E1, along with appropriate negative and positive controls. The RNAi agents were either unconjugated (CaSki cell assay) or conjugated to a GalNAc moiety by a linker as shown in Table 4 (NHPPH cell assay). For NHPPH cells, cells were glucose and serum starved for 24 h before induction of GCK expression by glucose, fructose, and insulin. Total RNA was extracted using a Qiagen RN easy 96 Kit (Qiagen, C at #74181) 48 hours post-transfection, which was subsequently converted to cDNA using SuperScript™ IV VILO™ reverse transcription mix. qRT-PCR was performed on the resulting cDNA using TaqMan™ probes for GCK and GAPDH. GCK fold change was calculated using the delta delta Ct method. The resulting knockdown of GSK expression is presented as a percentage in Table E1 (NHPPH cells) and Table E2 (CaSki cells).

TABLE E1
in vitro GCK mRNA expression in NHPPH cells

| Duplex | % knock down in | % knock down in |
|---|---|---|
| ID NO: | NHPPH (20 nM) | NHPPH (2 nM) |
| 572 | 47.03 ± 11.32 | 38.22 ± 14.51 |
| 574 | 71.06 ± 10.28 | 70.65 ± 8.86 |
| 634 | 6.71 ± 37.05 | 0 ± 47.46 |
| 636 | 0 ± 10.46 | 0 ± 22.13 |
| 655 | 42.72 ± 17.49 | 21.31 ± 7.49 |
| 749 | 0 ± 55 | 0 ± 17.36 |
| 780 | 11.86 ± 23.84 | 21.69 ± 10.88 |
| 784 | 61.33 ± 3.86 | 65.81 ± 7.41 |
| 786 | 49.64 ± 14.23 | 61.23 ± 10.8 |
| 787 | 64.91 ± 6.25 | 69.82 ± 7.75 |
| 789 | 80.83 ± 7.53 | 79.29 ± 1.59 |
| 828 | 0 ± 27.1 | 13.98 ± 9.17 |
| 829 | 46.7 ± 3.83 | 40.03 ± 14.03 |
| 835 | 82.37 ± 2.15 | 59.08 ± 9.24 |
| 836 | 69.33 ± 3.35 | 73.97 ± 15.07 |
| 841 | 74.92 ± 4.19 | 76.05 ± 9.72 |
| 882 | 50.24 ± 7.69 | 32.05 ± 8.13 |
| 953 | 61.66 ± 8.33 | 68.95 ± 6.11 |
| 955 | 23.21 ± 6.88 | 16.61 ± 26.99 |
| 962 | 63.37 ± 7.44 | 66.34 ± 9.75 |
| 966 | 45.94 ± 19.5 | 39.16 ± 13.89 |
| 969 | 54.84 ± 4.23 | 54.66 ± 6.64 |
| 1005 | 64.79 ± 6.66 | 75.44 ± 10.23 |
| 1007 | 35.97 ± 6.32 | 38.35 ± 7.84 |
| 1008 | 34.58 ± 16.28 | 36.65 ± 19.72 |
| 1009 | 52.42 ± 5.52 | 53.26 ± 8.21 |
| 1011 | 43.86 ± 4.44 | 7.93 ± 19.59 |
| 1012 | 26.17 ± 4.51 | 5.41 ± 7.74 |
| 1072 | 54.59 ± 15.75 | 14.26 ± 31.18 |
| 1076 | 65.95 ± 6.66 | 70.35 ± 9.54 |
| 1077 | 55.3 ± 1 | 59.76 ± 9.54 |
| 1078 | 70.97 ± 5.44 | 67.49 ± 3.04 |
| 1081 | 72.07 ± 7.84 | 79.25 ± 6.1 |
| 1084 | 60.7 ± 12.42 | 46.93 ± 4.86 |
| 1085 | 75.27 ± 21.21 | 68.23 ± 16.97 |
| 1088 | 74.84 ± 8.98 | 52.54 ± 21.76 |
| 1089 | 58.03 ± 11.78 | 53.14 ± 25.09 |
| 1107 | 82.89 ± 7.96 | 82.32 ± 1.22 |
| 1108 | 84.47 ± 5.54 | 78.94 ± 2.29 |
| 1109 | 72.65 ± 13.97 | 81.44 ± 3.8 |
| 1110 | 74.83 ± 7.44 | 74.85 ± 9 |
| 1111 | 76.39 ± 3.21 | 73.99 ± 4.13 |
| 1113 | 61.33 ± 7.45 | 52.27 ± 9.2 |
| 1114 | 61.85 ± 6.97 | 69.63 ± 16.13 |
| 1123 | 55.17 ± 27.48 | 38.87 ± 25.06 |
| 1124 | 73.33 ± 16.78 | 79.02 ± 7.61 |
| 1127 | 68.29 ± 7.88 | 60.61 ± 11.33 |
| 1130 | 34.96 ± 18.54 | 56.86 ± 13.32 |
| 1132 | 7.63 ± 55.32 | 0 ± 8.87 |
| 1134 | 70.4 ± 11.87 | 65.83 ± 3.31 |
| 1136 | 45.29 ± 3.1 | 33.97 ± 17.31 |
| 1138 | 68.08 ± 4.28 | 68.86 ± 5.25 |
| 1188 | 37.15 ± 17.02 | 19.45 ± 15.17 |
| 1291 | 47.16 ± 22.96 | 43.03 ± 17.7 |
| 1297 | 0 ± 20.05 | 0 ± 38.54 |
| 1298 | 44.38 ± 7.08 | 33.85 ± 7.7 |
| 1299 | 0 ± 25.23 | 0.69 ± 10.11 |
| 1300 | 39.99 ± 6.87 | 38.91 ± 17.49 |
| 1301 | 19.22 ± 12.8 | 0 ± 22.34 |
| 1340 | 71.56 ± 2.49 | 64.42 ± 6.08 |
| 1345 | 51.69 ± 4.27 | 40.09 ± 12.12 |
| 1347 | 39.67 ± 11.31 | 45.45 ± 26.54 |
| 1348 | 23.81 ± 13.02 | 21.53 ± 16.73 |
| 1349 | 59.66 ± 12.62 | 57.38 ± 15.66 |
| 1350 | 63.08 ± 18.09 | 48.16 ± 17.97 |
| 1355 | 5.22 ± 34.17 | 19.81 ± 6.07 |
| 1356 | 52.77 ± 9.63 | 60.29 ± 2.7 |
| 1359 | 0 ± 21.14 | 0 ± 21.92 |
| 1363 | 7.39 ± 15.29 | 0 ± 21.69 |
| 1365 | 17.94 ± 17.21 | 18.12 ± 14.96 |
| 1367 | 4.95 ± 24.99 | 5.29 ± 5.03 |
| 1399 | 51.43 ± 7.93 | 56.45 ± 7.45 |
| 1400 | 50.61 ± 10.95 | 43.85 ± 8.94 |
| 1513 | 41.89 ± 0.7 | 36.09 ± 18.58 |
| 1521 | 46.87 ± 10.42 | 34.85 ± 21.51 |
| 1526 | 55.64 ± 13.41 | 58.01 ± 3.61 |
| 1528 | 52.98 ± 5.07 | 56.2 ± 14.65 |
| 1688 | 55.37 ± 14.24 | 68.26 ± 0 |
| 1695 | 9.72 ± 14.72 | 30.27 ± 5.95 |
| 1696 | 10.56 ± 19.28 | 0 ± 7.53 |
| 1697 | 20.42 ± 14.16 | 13.96 ± 20.56 |
| 1701 | 2.18 ± 6.81 | 11.19 ± 23.65 |
| 1703 | 47.05 ± 11.42 | 64.9 ± 10.79 |
| 1704 | 45.08 ± 5.65 | 61.99 ± 11.75 |
| 1708 | 21.88 ± 13.7 | 7.36 ± 40.36 |
| 1774 | 62.49 ± 11.64 | 51.44 ± 7.62 |
| 1786 | 64.63 ± 4.24 | 67.13 ± 6.07 |
| 1789 | 59.44 ± 10.71 | 65.98 ± 9.89 |
| 1790 | 38.9 ± 6.4 | 40.47 ± 16.33 |
| 2180 | 38.86 ± 16.95 | 53.36 ± 12.18 |
| 2273 | 26.38 ± 17.7 | 0 ± 33.86 |
| 2297 | 29.91 ± 24.82 | 30.06 ± 6.27 |
| 2303 | 46 ± 11.96 | 57.49 ± 12.71 |
| 2492 | 50.5 ± 16.36 | 47.33 ± 8.88 |
| 2493 | 47.72 ± 8.8 | 58.84 ± 9.73 |
| 2609 | 6.79 ± 8.34 | 38.09 ± 30.67 |

TABLE E2
in vitro GCK mRNA expression in CaSki cells

| Duplex | % knock down in | % knock down in |
|---|---|---|
| ID NO: | CaSki (20 nM) | CaSki (2 nM) |
| 572 | 3.05 ± 5.89 | 0 ± 2.7 |
| 574 | 10.02 ± 2.76 | 0 ± 6.93 |
| 634 | 41.43 ± 4.28 | 5.79 ± 3.21 |
| 636 | 26.04 ± 2.82 | 23.91 ± 2.45 |
| 655 | 35.54 ± 6.46 | 23.33 ± 7.16 |
| 749 | 6.29 ± 3.84 | 8.43 ± 3.54 |
| 780 | 31.23 ± 2.3 | 14.77 ± 5.21 |
| 784 | 20.07 ± 2.13 | 14.3 ± 4.74 |
| 786 | 24.03 ± 2.64 | 10.69 ± 2.47 |
| 787 | 28.18 ± 4.74 | 7.6 ± 6.84 |
| 789 | 38.1 ± 10.19 | 17.1 ± 5.65 |
| 828 | 19.63 ± 6.66 | 5.65 ± 3.89 |
| 829 | 34.97 ± 3.11 | 13.98 ± 5.39 |
| 835 | 24.62 ± 9.87 | 17.82 ± 6.59 |
| 836 | 35.25 ± 2.34 | 25.19 ± 15.14 |
| 841 | 48.5 ± 10.12 | 22.8 ± 3.85 |
| 882 | 31.42 ± 2.3 | 18.06 ± 1.76 |
| 953 | 29.28 ± 8.54 | 14.53 ± 8.26 |
| 955 | 4.89 ± 4.56 | 7.45 ± 3.73 |
| 962 | 43.04 ± 3.24 | 30.77 ± 0.57 |
| 966 | 32.36 ± 2.34 | 14.74 ± 4.11 |
| 969 | 29.96 ± 5.19 | 12.12 ± 6.03 |
| 1005 | 26.38 ± 7.99 | 1.88 ± 4.82 |
| 1007 | 44.62 ± 4.33 | 31.39 ± 6.58 |
| 1008 | 36.56 ± 10.68 | 12.76 ± 2.79 |
| 1009 | 35.73 ± 5.23 | 21.33 ± 2.48 |
| 1011 | 50 ± 0.81 | 19.31 ± 1.71 |
| 1012 | 54.09 ± 5.24 | 17.12 ± 5.24 |
| 1072 | 57.12 ± 3.39 | 35.5 ± 7.46 |
| 1076 | 36.79 ± 2.63 | 19.74 ± 9 |
| 1077 | 28.09 ± 2.21 | 8.36 ± 9.81 |
| 1078 | 23.92 ± 6.16 | 2.52 ± 1.1 |
| 1081 | 43.74 ± 0.87 | 19.12 ± 2.59 |
| 1084 | 11.81 ± 7.08 | 0 ± 7.83 |
| 1085 | 17.73 ± 7.64 | 9.1 ± 9.17 |
| 1088 | 31.14 ± 8.87 | 14.36 ± 3.53 |
| 1089 | 25.1 ± 4.17 | 13.13 ± 3.65 |
| 1107 | 47.69 ± 10.87 | 18.85 ± 1.33 |
| 1108 | 32.55 ± 5.75 | 6.75 ± 10.64 |
| 1109 | 31.32 ± 6.96 | 6.06 ± 4.64 |
| 1110 | 18.08 ± 3.76 | 18.54 ± 15.33 |
| 1111 | 0 ± 17.31 | 6.42 ± 12.44 |
| 1113 | 32.15 ± 6.64 | 23.02 ± 2.88 |
| 1114 | 39.83 ± 2.3 | 38.67 ± N/A |
| 1123 | 37.88 ± 3.25 | 13.44 ± N/A |
| 1124 | 53.7 ± 1.24 | 36.34 ± N/A |
| 1127 | 59.5 ± 1.45 | 28.2 ± N/A |
| 1130 | 23.47 ± 8.81 | N/A |
| 1132 | 14.07 ± 8.4 | N/A |
| 1134 | 31.47 ± 9.45 | N/A |
| 1136 | 33.5 ± 5 | 9.54 ± 5.74 |
| 1138 | 19.72 ± 8.24 | 14.89 ± 5.42 |
| 1188 | 23.34 ± 6.8 | 24.89 ± 6.98 |
| 1291 | 21.51 ± 4.88 | 22.38 ± 8.34 |
| 1297 | 15.38 ± 9.42 | 30.44 ± 5.04 |
| 1298 | 32.11 ± 10.32 | 29.72 ± 6.12 |
| 1299 | 29.3 ± 8.34 | 29.32 ± 2.21 |
| 1300 | 34.56 ± 9.95 | 33.1 ± 1.92 |
| 1301 | 20.33 ± 6.06 | 11.2 ± 1.24 |
| 1340 | 13.06 ± 4.06 | 5.4 ± 8.42 |
| 1345 | 15.52 ± 12.86 | 6.44 ± 13.95 |
| 1347 | 30.83 ± 7.99 | 16.74 ± 10.3 |
| 1348 | 25.89 ± 3.05 | 3.09 ± 3.85 |
| 1349 | 38.87 ± 1.54 | 34.54 ± 4.78 |
| 1350 | 26.18 ± 5.01 | 15.96 ± 1.8 |
| 1355 | 10.14 ± 5.12 | 11.13 ± 25.27 |
| 1356 | 46.37 ± 5.48 | 29.78 ± 0.29 |
| 1359 | 40.31 ± 6.86 | N/A |
| 1363 | 36.6 ± 3.31 | N/A |
| 1365 | 26.31 ± 2.96 | N/A |
| 1367 | 0 ± 3.11 | 0 ± 2.95 |
| 1399 | 29.58 ± 6.19 | 0 ± 4.76 |
| 1400 | 8.53 ± 7.68 | 6.01 ± 5.84 |
| 1513 | 68.81 ± 7.53 | 53.31 ± 6.31 |
| 1521 | 69.22 ± 2.12 | 49.07 ± 3.65 |
| 1526 | 74.4 ± 11.08 | 44.34 ± 3.41 |
| 1528 | 76.13 ± 3.37 | 66.12 ± 7.05 |
| 1688 | 73.18 ± 5.13 | 60.29 ± 3.45 |
| 1695 | 51.92 ± 4.92 | 16.62 ± 11.49 |
| 1696 | 76.87 ± 7.36 | 67.71 ± 2.27 |
| 1697 | 69.87 ± 4.43 | 45.37 ± 9.8 |
| 1701 | 51.66 ± 1.33 | 47.84 ± 2.54 |
| 1703 | 87.34 ± 2.15 | 86.35 ± 1.66 |
| 1704 | 91.2 ± 1.4 | 88.69 ± 2.17 |
| 1708 | 86.3 ± 1.02 | 69.76 ± 3.37 |
| 1774 | 86.85 ± 1.97 | 89.02 ± 2.25 |
| 1786 | 89.59 ± 5.54 | 86.34 ± 1.62 |
| 1789 | 89.01 ± 2.86 | 91.95 ± 4.17 |
| 1790 | 91.95 ± 4.17 | 83.8 ± 3.98 |
| 2180 | 88.91 ± 2.05 | 84.44 ± 2.16 |
| 2273 | 67.66 ± 5.03 | 33.07 ± 10.73 |
| 2297 | 81.51 ± 2.86 | 76.84 ± 4.37 |
| 2303 | 87.45 ± 6.66 | 88.45 ± 3.29 |
| 2492 | 75.16 ± 9.35 | 60.18 ± 4.64 |
| 2493 | 83.91 ± 4.78 | 77.44 ± 9.74 |
| 2609 | 80.08 ± 7.07 | 75.28 ± 2.99 |

[2538] The 20 GalNAc-conjugated RNAi agents that result in the greatest knockdown percentage of GCK mRNA in CaSki or NHPPH were selected for analysis in an in vitro knockdown assessment in primary human hepatocytes (PHHs).

[2539] Primary human hepatocytes (PHHs) were transfected with 20 nM, 2 nM, and 0.2 nM of one of the GCK RNAi agents provided in Table E3 along with appropriate negative and positive controls. Cells were glucose and serum starved for 24 h before induction of GCK expression by glucose and insulin. The resulting knockdown of GSK mRNA expression is presented as a percentage in Table E3.

TABLE E3
in vitro GCK mRNA expression in human primary hepatocytes

| Duplex | % knock down in | % knock down in | % knock down in |
|---|---|---|---|
| ID NO: | HPP (20 nM) | HPP (2 nM) | HPP (0.2 nM) |
| 784 | 81.94 ± 0.06 | 79.73 ± 0.12 | 75.29 ± 0.23 |
| 789 | 81.46 ± 0.16 | 80.16 ± 0.11 | 69.63 ± 0.07 |
| 835 | 83.21 ± 0.14 | 77.14 ± 0.18 | 69.58 ± 0.23 |
| 841 | 87.13 ± 0.08 | 78.75 ± 0.15 | 68.02 ± 0.17 |
| 1085 | 75.69 ± 0.19 | 78.1 ± 0.12 | 58.08 ± 0.33 |
| 1088 | 72 ± 0.09 | 51.3 ± 0.36 | −4.8 ± 0.64 |
| 1107 | 78.36 ± 0.03 | 65.2 ± 0.13 | 69.8 ± 0.09 |
| 1108 | 80.33 ± 0.06 | 81.44 ± 0.06 | 70.01 ± 0.14 |
| 1110 | 65.7 ± 0.12 | 68.41 ± 0.06 | 66.35 ± 0.03 |
| 1111 | 76.9 ± 0.02 | 72.52 ± 0.03 | 64.26 ± 0.18 |
| 1138 | 83.24 ± 0.13 | 84.69 ± 0.02 | 46.29 ± 0.33 |
| 1528 | 57.13 ± 0.13 | 68.46 ± 0.05 | 69.46 ± 0.2 |
| 1703 | 51.12 ± 7.68 | NA | NA |
| 1704 | 64.82 ± 0.17 | 44.17 ± 0.21 | 52.17 ± 0.23 |
| 1774 | 54.63 ± 0.11 | 12.82 ± 0.17 | 38.16 ± 0.16 |
| 1786 | 79.31 ± 0.06 | 61.28 ± 0.04 | 51.72 ± 0.13 |
| 1789 | 62.91 ± 0.13 | 66.5 ± 0.04 | 56.16 ± 0.11 |
| 1790 | 66.15 ± 0.06 | 49.22 ± 0.26 | 44.7 ± 0.22 |
| 2180 | 61.4 ± 0.12 | 45.64 ± 0.24 | 12.97 ± 0.48 |
| 2303 | 52.45 ± 0.05 | 50.93 ± 0.16 | 52.05 ± 0.07 |

### Example 3: Determination of mRNA Inhibition by Selective RNAi Agents

[2540] This Example describes the testing of selective RNAi agents in a CaSki cell line, which constitutively expresses GCK. Lysates were used in order to determine the extent of the knockdown of the GCK gene by measuring mRNA expression by RT-qPCR. The twenty RNAi agents that result in the greatest knockdown percentage of GCK mRNA are selected for re-synthesis as GalNAc-conjugates as described in Example 5 below. A dose curve showing four exemplary RNAi agents is shown in FIG. 1A. The bottom value and the IC50 of the selective RNAi agents is shown in Table E4.

TABLE E4
Bottom value and IC50 in CaSki cells

| Duplex ID NO: | Bottom value | IC50 |
|---|---|---|
| 784 | NT | NT |
| 841 | NT | NT |
| 1085 | NT | NT |
| 1138 | NT | NT |
| 1704 | 23.1 ± 15.58 | 0.02 ± 0.01 |
| 1774 | 19.3 ± 2.91 | 0.03 ± 0.01 |
| 1790 | 46.33 ± 1.24 | 0.04 ± 0.04 |
| 2180 | 30.64 ± 12.19 | 0.04 ± 0.03 |

### Example 4: Engineering of a HepG2 Cell Line that Constitutively Expresses GCK

[2541] HepG2 cells were transfected with GCK-ORF cDNA by PiggyBac, followed by puromycin selection. Clonal lines were generated and compared to pools; clones showed no difference in gene expression or stability to clonal pools; therefore, RNAi screening was performed with clonal pools (herein referred to as HepG2-GCK).

### Example 5: Production and Efficacy of GalNAc Conjugates

[2542] This Example describes the GalNAc conjugation of the twenty selected RNAi agents from Example 2. The sense strands of the RNAi agents are equipped with a triantennary GalNAc moiety on their 3′-ends, introduced by assembly on a commercially available GalNAc-loaded solid support (GalNAc-TEG cluster available through Primetech).

[2543] The GalNAc-conjugated RNAi agents are then tested for the ability to inhibit GCK mRNA in non-human primate primary hepatocytes (NHPPH) and HepG2-GCK. Dose curves for the eight select GalNAc-conjugated RNAi agents that result in the greatest knockdown percentage of GCK mRNA are shown in FIG. 1B and FIG. 1C (NHPPH cells) and FIG. 1D and FIG. 1E (HepG2-GCK cells). The bottom value and the IC50 of the selective RNAi agents is shown in Table E5 (NHPPH cells) and Table E6 (HepG2-GCK cells).

TABLE E5
Bottom value and IC50 in NHPPH cells

| Duplex ID NO: | Bottom value | IC50 |
|---|---|---|
| 784 | 30.11 ± 1.25 | 0.01 ± 0.01 |
| 841 | 36.13 ± 6.94 | 0.05 ± 0.06 |
| 1085 | 43.05 ± 6.53 | 0.13 ± 0.01 |
| 1138 | 51.22 ± 19.81 | 0.02 ± 0.02 |
| 1704 | 26.8 ± 1.09 | 0.14 ± 0.03 |
| 1774 | 29.6 ± 6.11 | 0.1 ± 0.13 |
| 1790 | 21.68 ± 4 | 0.15 ± 0.03 |
| 2180 | 28.22 ± 4.78 | 0.32 ± 0.26 |

TABLE E6
Bottom value and IC50 in HepG2-GCK cells

| Duplex ID NO: | Bottom value | IC50 |
|---|---|---|
| 784 | 10.2 ± 4.49 | 0.01 ± 0.01 |
| 841 | 16.09 ± 6.04 | 0.01 ± 0.01 |
| 1085 | 20.16 ± 2.33 | 0.02 ± 0.01 |
| 1138 | 23.79 ± 1.74 | 0.01 ± 0.01 |
| 1704 | 26.36 ± 8.12 | 0.41 ± 0.06 |
| 1774 | 27.33 ± 1.61 | 0.01 ± 0.02 |
| 1790 | 22.38 ± 3.33 | 0.32 ± 0.01 |
| 2180 | NT | NT |

[2544] These eight GalNAc-conjugated RNAi agents that result in the greatest knockdown percentage of GCK mRNA are selected for in vivo dose response analysis of therapeutic efficacy described in Example 6.

### Example 6: In vivo Screening of RNAi Agents

[2545] This Example describes in vivo screening of selected GalNAc conjugated-GCK RNAi agents for their ability to inhibit GCK expression and ability to reduce liver fat in model mice.

A. Design of exemplary GCK RNAi agents

[2546] The sense strands of several exemplary GCK RNAi agents included a triantennary GalNAc moiety on their 3′-ends. The (GalNAc moiety)+(linker) has a structure as shown in Table 4. The resulting GalNAc-conjugated GCK RNAi agents were used to conduct in vivo experiments.

B. In vivo screening of exemplary GCK RNAi agents

[2547] Animal experiments were conducted in accordance with the Institutional Animal Care and Use Committee (IACUC) guidelines at Charles River, Massachusetts. A diet induced obese (DIO) mouse model was used to evaluate GCK gene expression knockdown and liver fat reduction following GCK RNAi agent transfection. Briefly, C57BL/6Ntac male mice were fed a 60% High fat diet (Research Diet #D12492) for 16 weeks. After acclimatization for 2 weeks, mice were administered subcutaneous injections of either phosphate buffer saline (PBS, pH 7.4) as a control, or 10 mg/kg of selected GCK RNAi agents, and were fed the diet for an additional 4 weeks.

[2548] After 4 weeks, animals are euthanized and maximum blood is collected via abdominal aorta and processed to serum. Terminal serum from all groups is analyzed for alanine aminotransferase (ALT), aspartate aminotransferase (AST), liver triglycerides (TG), glucose, and liver triglycerides via plate based assay. Mouse livers are harvested and weighed. Left median lobe (LML) is collected in RNA later. Approximately 50 mg tissue from right lateral lobe is weighed and snap-frozen for liver triglyceride assay. All remaining liver is snap-frozen. Epididymal fat pads are harvested, weighed, and snap frozen. The harvested liver tissue was stored at −80° C. for future analysis.

[2549] GCK gene expression knockdown at the mRNA level in the harvested liver tissue was determined by qPCR. Briefly, total RNA was extracted using QiaZol according to the manufacturer's instructions (Qiagen) and purified using a Qiagen R N easy 96 Kit (Qiagen, Cat #74181). RNA was subsequently converted to cDNA using SuperScript™ IV V ILO™ reverse transcription mix. RT-qPCR was performed on the resulting cDNA using TaqMan™ probes for GCK and GAPDH. GCK fold change was calculated using the delta delta Ct method. These values are shown in FIG. 2A and Table E7 as a percent of GCK mRNA expression in mice treated with selected GCK RNAi agents relative to mice treated with PBS.

[2550] GCK protein expression was determined by Jess Automated Western Blot System (Protein Simple) using an antibody to GCK (Protein Tech). Protein content was normalized using a BCA Protein Assay Kit (MilliporeSigma) before loading, and internal Vinculin was used as an internal control (Protein Simple). These values are shown in FIG. 2B and Table E7 as a percent of GCK protein remaining in mice treated with selected GCK RNAi agents relative to mice treated with PBS.

[2551] Liver fat in mice was measured using a colorimetric assay performed according to the manufacturer's protocol (Triglyceride Colorimetric Assay Kit, Cayman Chemicals). Reduction in liver fat, as determined as a measurement of hepatic triglycerides, in mice treated with the selected GalNAc conjugated-GCK RNAi agents was compared to that of mice treated with PBS. As shown in FIG. 3 and Table E7, a majority of GalNAc conjugated-GCK RNAi agents were able to reduce hepatic triglycerides in mice as compared to mice treated with PBS, with no significant change in fasted hepatic glycogen content.

TABLE E7
GCK mRNA expression knockdown, GCK protein
knockdown, and triglyceride reduction

| | | | Mean triglyceride |
|---|---|---|---|
| Duplex | Mean % mRNA | Mean % Protein | (% reduction) |
| ID NO: | knockdown | knockdown | relative to PBS |
| Vehicle (PBS) | — | — | — |
| 784 | 51.24 ± 12.64 | 27.3 ± 15.94 | 39.55 ± 9.4 |
| 789 | 65.01 ± 9.47 | 54.4 ± 12.71 | 52.98 ± 8.41 |
| 835 | 61.79 ± 7 | 24.8 ± 6.1 | −49.7 ± 28.72 |
| 841 | 57.4 ± 8.44 | 57.8 ± 2.78 | 43.66 ± 3.57 |
| 1085 | 73.62 ± 7.71 | 67 ± 4.28 | 17.86 ± 9.79 |
| 1088 | 18.41 ± 9.16 | 7.1 ± 17.23 | 35.92 ± 6.15 |
| 1107 | 88.95 ± 3.93 | 88.95 ± 3.93 | 30.37 ± 8.9 |
| 1108 | 86.64 ± 1.84 | 86.64 ± 1.84 | 27.89 ± 7.24 |
| 1110 | 79.25 ± 4.44 | 79.25 ± 4.44 | 14.38 ± 10.18 |
| 1111 | 21 ± 17.68 | 21 ± 17.68 | 24.56 ± 19.21 |
| 1138 | 64.55 ± 13.4 | 64.55 ± 13.4 | 35.85 ± 10.91 |
| 1528 | 44.2 ± 11.16 | 44.2 ± 11.16 | 41.97 ± 11.48 |
| 1703 | 82.4 ± 3.73 | 82.4 ± 3.73 | 2.05 ± 15.28 |
| 1704 | 72.1 ± 3.47 | 72.1 ± 3.47 | 33.61 ± 8.01 |
| 1774 | 6.9 ± 13.51 | 0 ± 3.49 | 38.4 ± 5.78 |
| 1786 | 49.2 ± 14.9 | 7.7 ± 3.31 | 19.22 ± 5.96 |
| 1789 | 36 ± 14.46 | 1.8 ± 13.12 | 18.7 ± 9.87 |
| 1790 | 55.2 ± 8.06 | 0 ± 4.74 | 13.27 ± 13.96 |
| 2180 | 71.5 ± 6.17 | 16 ± 6.11 | 29.24 ± 7.04 |
| 2303 | 49.5 ± 5.93 | 3.1 ± 8.65 | 14.61 ± 27.48 |

[2552] Serum alanine aminotransferase (ALT), aspartate aminotransferase (AST), plasma glucose, and hepatic glycogen were measured by colorimetric methods performed according to the manufacturer's protocol (Triglyceride Colorimetric Assay Kit, Cayman Chemicals; Glycogen-Glo Assay, Promega). These values are shown in Table E8.

TABLE E8
GCK mRNA expression knockdown, GCK protein
knockdown, and triglyceride reduction

| | Mean Glycogen | Mean Plasma Glucose |
|---|---|---|
| | (% of Vehicle) | (mg/dL) |
| Vehicle (PBS) | — | 195 ± 18.62 |
| Duplex No. 784 | 108.33 ± 10.01 | 188 ± 27.58 |
| Duplex No. 789 | 107.69 ± 8.05 | 195.5 ± 17.059 |
| Duplex No. 835 | 75 ± 4.71 | 206.5 ± 20.421 |
| Duplex No. 841 | 95.24 ± 5.21 | 199.25 ± 27.035 |
| Duplex No. 1085 | 140 ± 2.5 | 182 ± 2.708 |
| Duplex No. 1088 | 121.43 ± 7.73 | 225.25 ± 34.664 |
| Duplex No. 1107 | 88.24 ± 3.55 | 226.25 ± 36.087 |
| Duplex No. 1108 | 103.33 ± 5.82 | 237.5 ± 26.988 |
| Duplex No. 1110 | 103.23 ± 2.8 | 208.75 ± 24.622 |
| Duplex No. 1111 | 101.96 ± 9.44 | 160.75 ± 9.394 |
| Duplex No. 1138 | 81.25 ± 1.9 | 204.25 ± 22.096 |
| Duplex No. 1528 | 117.65 ± 16.43 | 162.25 ± 11.73 |
| Duplex No. 1703 | 88.24 ± 8.26 | 159 ± 18.111 |
| Duplex No. 1704 | 109.8 ± 6.75 | 185 ± 22.435 |
| Duplex No. 1774 | 103.92 ± 12.97 | 157.75 ± 21.899 |
| Duplex No. 1786 | 129.41 ± 12.53 | 183.75 ± 10.72 |
| Duplex No. 1789 | 70.59 ± 1.41 | 179 ± 9.695 |
| Duplex No. 1790 | 80.39 ± 8.84 | 172.75 ± 24.932 |
| Duplex No. 2180 | 86.27 ± 26.71 | 174.25 ± 7.274 |
| Duplex No. 2303 | 88.24 ± 12.54 | 189 ± 28.694 |

| | Mean AST (U/L) | Mean ALT (U/L) |
|---|---|---|
| Vehicle (PBS) | 208.5 ± 52.206 | 180.125 ± 50.7135 |
| Duplex No. 784 | 252 ± 97.43 | 136.5 ± 77.479 |
| Duplex No. 789 | 188.25 ± 52.322 | 91 ± 25.153 |
| Duplex No. 835 | 367.75 ± 69.744 | 300.5 ± 68.898 |
| Duplex No. 841 | 160.75 ± 24.377 | 73.5 ± 5 |
| Duplex No. 1085 | 192.75 ± 86.454 | 163.5 ± 61.674 |
| Duplex No. 1088 | 139 ± 42.965 | 107.5 ± 47.892 |
| Duplex No. 1107 | 163.75 ± 23.684 | 165.25 ± 58.317 |
| Duplex No. 1108 | 211.5 ± 27.815 | 188.5 ± 26.64 |
| Duplex No. 1110 | 243.75 ± 57.209 | 290.25 ± 93.756 |
| Duplex No. 1111 | 120.75 ± 30.445 | 110.5 ± 50.216 |
| Duplex No. 1138 | 119.5 ± 20.809 | 90.25 ± 33.629 |
| Duplex No. 1528 | 206.5 ± 31.204 | 135.5 ± 31.032 |
| Duplex No. 1703 | 669.75 ± 308.471 | 454.75 ± 148.95 |
| Duplex No. 1704 | 195.5 ± 47.135 | 111 ± 26.369 |
| Duplex No. 1774 | 188.75 ± 46.27 | 189 ± 48.874 |
| Duplex No. 1786 | 173.25 ± 34.131 | 168 ± 37.754 |
| Duplex No. 1789 | 191.5 ± 79.81 | 194 ± 130.494 |
| Duplex No. 1790 | 221.75 ± 42.406 | 230 ± 67.809 |
| Duplex No. 2180 | 556.75 ± 125.223 | 390.5 ± 93.746 |
| Duplex No. 2303 | 507 ± 157.647 | 457.5 ± 162.539 |

The application's sequence listing, which the Patent Office published only in electronic form, follows.

SEQUENCE LISTING (481 sequences)

SEQ ID NO: 1 - DNA, 23 bp, synthetic construct
  source 1..23: mol_type = other DNA
ccgtctcatcaccttcttcaggt

SEQ ID NO: 2 - DNA, 23 bp, synthetic construct
  source 1..23: mol_type = other DNA
atccgtctcatcaccttcttcag

SEQ ID NO: 3 - DNA, 23 bp, synthetic construct
  source 1..23: mol_type = other DNA
atcttcacactggcctcttcatg

SEQ ID NO: 4 - DNA, 23 bp, synthetic construct
  source 1..23: mol_type = other DNA
gcatcttcacactggcctcttca

SEQ ID NO: 5 - DNA, 23 bp, synthetic construct
  source 1..23: mol_type = other DNA
gagcgcacgtaggtgggcagcat

SEQ ID NO: 6 - DNA, 23 bp, synthetic construct
  source 1..23: mol_type = other DNA
ctcaccttctcccaccttcacca

SEQ ID NO: 7 - DNA, 23 bp, synthetic construct
  source 1..23: mol_type = other DNA
ggtgtttggtcttcacgctccac

SEQ ID NO: 8 - DNA, 23 bp, synthetic construct
  source 1..23: mol_type = other DNA
atctggtgtttggtcttcacgct

SEQ ID NO: 9 - DNA, 23 bp, synthetic construct
  source 1..23: mol_type = other DNA
acatctggtgtttggtcttcacg

SEQ ID NO: 10 - DNA, 23 bp, synthetic construct
  source 1..23: mol_type = other DNA
tacatctggtgtttggtcttcac

SEQ ID NO: 11 - DNA, 23 bp, synthetic construct
  source 1..23: mol_type = other DNA
agtacatctggtgtttggtcttc

SEQ ID NO: 12 - DNA, 23 bp, synthetic construct
  source 1..23: mol_type = other DNA
gcatctcagcagtgccggtcatg

SEQ ID NO: 13 - DNA, 23 bp, synthetic construct
  source 1..23: mol_type = other DNA
agcatctcagcagtgccggtcat

SEQ ID NO: 14 - DNA, 23 bp, synthetic construct
  source 1..23: mol_type = other DNA
tcgaagagcatctcagcagtgcc

SEQ ID NO: 15 - DNA, 23 bp, synthetic construct
  source 1..23: mol_type = other DNA
gtcgaagagcatctcagcagtgc

SEQ ID NO: 16 - DNA, 23 bp, synthetic construct
  source 1..23: mol_type = other DNA
atgtagtcgaagagcatctcagc

SEQ ID NO: 17 - DNA, 23 bp, synthetic construct
  source 1..23: mol_type = other DNA
tcatctgatgcttgtccaggaag

SEQ ID NO: 18 - DNA, 23 bp, synthetic construct
  source 1..23: mol_type = other DNA
gatgcccttatcgatgtcttcgt

SEQ ID NO: 19 - DNA, 23 bp, synthetic construct
  source 1..23: mol_type = other DNA
aggatgcccttatcgatgtcttc

SEQ ID NO: 20 - DNA, 23 bp, synthetic construct
  source 1..23: mol_type = other DNA
gttgagaaggatgcccttatcga

SEQ ID NO: 21 - DNA, 23 bp, synthetic construct
  source 1..23: mol_type = other DNA
tccagttgagaaggatgccctta

SEQ ID NO: 22 - DNA, 23 bp, synthetic construct
  source 1..23: mol_type = other DNA
tggtccagttgagaaggatgccc

SEQ ID NO: 23 - DNA, 23 bp, synthetic construct
  source 1..23: mol_type = other DNA
cattgttcccttctgctcctgag

SEQ ID NO: 24 - DNA, 23 bp, synthetic construct
  source 1..23: mol_type = other DNA
gacattgttcccttctgctcctg

SEQ ID NO: 25 - DNA, 23 bp, synthetic construct
  source 1..23: mol_type = other DNA
cgacattgttcccttctgctcct

SEQ ID NO: 26 - DNA, 23 bp, synthetic construct
  source 1..23: mol_type = other DNA
acgacattgttcccttctgctcc

SEQ ID NO: 27 - DNA, 23 bp, synthetic construct
  source 1..23: mol_type = other DNA
ccacgacattgttcccttctgct

SEQ ID NO: 28 - DNA, 23 bp, synthetic construct
  source 1..23: mol_type = other DNA
cccacgacattgttcccttctgc

SEQ ID NO: 29 - DNA, 23 bp, synthetic construct
  source 1..23: mol_type = other DNA
accattgccaccacatccatttc

SEQ ID NO: 30 - DNA, 23 bp, synthetic construct
  source 1..23: mol_type = other DNA
attcaccattgccaccacatcca

SEQ ID NO: 31 - DNA, 23 bp, synthetic construct
  source 1..23: mol_type = other DNA
cattcaccattgccaccacatcc

SEQ ID NO: 32 - DNA, 23 bp, synthetic construct
  source 1..23: mol_type = other DNA
tcattcaccattgccaccacatc

SEQ ID NO: 33 - DNA, 23 bp, synthetic construct
  source 1..23: mol_type = other DNA
gtgtcattcaccattgccaccac

SEQ ID NO: 34 - DNA, 23 bp, synthetic construct
  source 1..23: mol_type = other DNA
accgtgtcattcaccattgccac

SEQ ID NO: 35 - DNA, 23 bp, synthetic construct
  source 1..23: mol_type = other DNA
caccgtgtcattcaccattgcca

SEQ ID NO: 36 - DNA, 23 bp, synthetic construct
  source 1..23: mol_type = other DNA
ggccaccgtgtcattcaccattg

SEQ ID NO: 37 - DNA, 23 bp, synthetic construct
  source 1..23: mol_type = other DNA
tggccaccgtgtcattcaccatt

SEQ ID NO: 38 - DNA, 23 bp, synthetic construct
  source 1..23: mol_type = other DNA
agtagcaggagatcatcgtggcc

SEQ ID NO: 39 - DNA, 23 bp, synthetic construct
  source 1..23: mol_type = other DNA
tagtagcaggagatcatcgtggc

SEQ ID NO: 40 - DNA, 23 bp, synthetic construct
  source 1..23: mol_type = other DNA
gtagtagcaggagatcatcgtgg

SEQ ID NO: 41 - DNA, 23 bp, synthetic construct
  source 1..23: mol_type = other DNA
cgtagtagcaggagatcatcgtg

SEQ ID NO: 42 - DNA, 23 bp, synthetic construct
  source 1..23: mol_type = other DNA
tcgtagtagcaggagatcatcgt

SEQ ID NO: 43 - DNA, 23 bp, synthetic construct
  source 1..23: mol_type = other DNA
cttcgtagtagcaggagatcatc

SEQ ID NO: 44 - DNA, 23 bp, synthetic construct
  source 1..23: mol_type = other DNA
tcttcgtagtagcaggagatcat

SEQ ID NO: 45 - DNA, 23 bp, synthetic construct
  source 1..23: mol_type = other DNA
cactgatggtcttcgtagtagca

SEQ ID NO: 46 - DNA, 23 bp, synthetic construct
  source 1..23: mol_type = other DNA
gcactgatggtcttcgtagtagc

SEQ ID NO: 47 - DNA, 23 bp, synthetic construct
  source 1..23: mol_type = other DNA
ctcgcactgatggtcttcgtagt

SEQ ID NO: 48 - DNA, 23 bp, synthetic construct
  source 1..23: mol_type = other DNA
gacctcgcactgatggtcttcgt

SEQ ID NO: 49 - DNA, 23 bp, synthetic construct
  source 1..23: mol_type = other DNA
ccgacctcgcactgatggtcttc

SEQ ID NO: 50 - DNA, 23 bp, synthetic construct
  source 1..23: mol_type = other DNA
tgccgacctcgcactgatggtct

SEQ ID NO: 51 - DNA, 23 bp, synthetic construct
  source 1..23: mol_type = other DNA
catgccgacctcgcactgatggt

SEQ ID NO: 52 - DNA, 23 bp, synthetic construct
  source 1..23: mol_type = other DNA
atcatgccgacctcgcactgatg

SEQ ID NO: 53 - DNA, 23 bp, synthetic construct
  source 1..23: mol_type = other DNA
ccacattctgcatctcctccatg

SEQ ID NO: 54 - DNA, 23 bp, synthetic construct
  source 1..23: mol_type = other DNA
aggcggtcatactccagcaggaa

SEQ ID NO: 55 - DNA, 23 bp, synthetic construct
  source 1..23: mol_type = other DNA
tccaccaggcggtcatactccag

SEQ ID NO: 56 - DNA, 23 bp, synthetic construct
  source 1..23: mol_type = other DNA
gtccaccaggcggtcatactcca

SEQ ID NO: 57 - DNA, 23 bp, synthetic construct
  source 1..23: mol_type = other DNA
cgtccaccaggcggtcatactcc

SEQ ID NO: 58 - DNA, 23 bp, synthetic construct
  source 1..23: mol_type = other DNA
tcgtccaccaggcggtcatactc

SEQ ID NO: 59 - DNA, 23 bp, synthetic construct
  source 1..23: mol_type = other DNA
ctcgtccaccaggcggtcatact

SEQ ID NO: 60 - DNA, 23 bp, synthetic construct
  source 1..23: mol_type = other DNA
gagcttctcatacagctgctgac

SEQ ID NO: 61 - DNA, 23 bp, synthetic construct
  source 1..23: mol_type = other DNA
cctatgagcttctcatacagctg

SEQ ID NO: 62 - DNA, 23 bp, synthetic construct
  source 1..23: mol_type = other DNA
cacctatgagcttctcatacagc

SEQ ID NO: 63 - DNA, 23 bp, synthetic construct
  source 1..23: mol_type = other DNA
ccacctatgagcttctcatacag

SEQ ID NO: 64 - DNA, 23 bp, synthetic construct
  source 1..23: mol_type = other DNA
gccacctatgagcttctcataca

SEQ ID NO: 65 - DNA, 23 bp, synthetic construct
  source 1..23: mol_type = other DNA
tgccacctatgagcttctcatac

SEQ ID NO: 66 - DNA, 23 bp, synthetic construct
  source 1..23: mol_type = other DNA
gtacttgccacctatgagcttct

SEQ ID NO: 67 - DNA, 23 bp, synthetic construct
  source 1..23: mol_type = other DNA
tgtacttgccacctatgagcttc

SEQ ID NO: 68 - DNA, 23 bp, synthetic construct
  source 1..23: mol_type = other DNA
ccatgtacttgccacctatgagc

SEQ ID NO: 69 - DNA, 23 bp, synthetic construct
  source 1..23: mol_type = other DNA
tcgcccatgtacttgccacctat

SEQ ID NO: 70 - DNA, 23 bp, synthetic construct
  source 1..23: mol_type = other DNA
gctcgcccatgtacttgccacct

SEQ ID NO: 71 - DNA, 23 bp, synthetic construct
  source 1..23: mol_type = other DNA
cagctcgcccatgtacttgccac

SEQ ID NO: 72 - DNA, 23 bp, synthetic construct
  source 1..23: mol_type = other DNA
tcgtccacgagcctgagcagcac

SEQ ID NO: 73 - DNA, 23 bp, synthetic construct
  source 1..23: mol_type = other DNA
ttcgtccacgagcctgagcagca

SEQ ID NO: 74 - DNA, 23 bp, synthetic construct
  source 1..23: mol_type = other DNA
ttgtagatctgcttgcggtcgcc

SEQ ID NO: 75 - DNA, 23 bp, synthetic construct
  source 1..23: mol_type = other DNA
tcaggatgttgtagatctgcttg

SEQ ID NO: 76 - DNA, 23 bp, synthetic construct
  source 1..23: mol_type = other DNA
cgtgctcaggatgttgtagatct

SEQ ID NO: 77 - DNA, 23 bp, synthetic construct
  source 1..23: mol_type = other DNA
agcgtgctcaggatgttgtagat

SEQ ID NO: 78 - DNA, 23 bp, synthetic construct
  source 1..23: mol_type = other DNA
cacgcccacagtgatgcgcatta

SEQ ID NO: 79 - DNA, 23 bp, synthetic construct
  source 1..23: mol_type = other DNA
agccatccacgcccacagtgatg

SEQ ID NO: 80 - DNA, 23 bp, synthetic construct
  source 1..23: mol_type = other DNA
gagccatccacgcccacagtgat

SEQ ID NO: 81 - DNA, 23 bp, synthetic construct
  source 1..23: mol_type = other DNA
ggagccatccacgcccacagtga

SEQ ID NO: 82 - DNA, 23 bp, synthetic construct
  source 1..23: mol_type = other DNA
acacggagccatccacgcccaca

SEQ ID NO: 83 - DNA, 23 bp, synthetic construct
  source 1..23: mol_type = other DNA
gtacacggagccatccacgccca

SEQ ID NO: 84 - DNA, 23 bp, synthetic construct
  source 1..23: mol_type = other DNA
tgtacacggagccatccacgccc

SEQ ID NO: 85 - DNA, 23 bp, synthetic construct
  source 1..23: mol_type = other DNA
agcttgtacacggagccatccac

SEQ ID NO: 86 - DNA, 23 bp, synthetic construct
  source 1..23: mol_type = other DNA
gtgatctcgcagctgggcgtcag

SEQ ID NO: 87 - DNA, 23 bp, synthetic construct
  source 1..23: mol_type = other DNA
gactcgatgaaggtgatctcgca

SEQ ID NO: 88 - DNA, 23 bp, synthetic construct
  source 1..23: mol_type = other DNA
tccgactcgatgaaggtgatctc

SEQ ID NO: 89 - DNA, 23 bp, synthetic construct
  source 1..23: mol_type = other DNA
ctccgactcgatgaaggtgatct

SEQ ID NO: 90 - DNA, 23 bp, synthetic construct
  source 1..23: mol_type = other DNA
ctgacagtgtggaaatgcatcaa

SEQ ID NO: 91 - DNA, 23 bp, synthetic construct
  source 1..23: mol_type = other DNA
cccacacaggatgagttcccagg

SEQ ID NO: 92 - DNA, 23 bp, synthetic construct
  source 1..23: mol_type = other DNA
tggtcaagctgttggagctgcct

SEQ ID NO: 93 - DNA, 23 bp, synthetic construct
  source 1..23: mol_type = other DNA
taggtctggtcaagctgttggag

SEQ ID NO: 94 - DNA, 23 bp, synthetic construct
  source 1..23: mol_type = other DNA
gtccatcccagaatcacaagcca

SEQ ID NO: 95 - DNA, 23 bp, synthetic construct
  source 1..23: mol_type = other DNA
ggtccatcccagaatcacaagcc

SEQ ID NO: 96 - DNA, 23 bp, synthetic construct
  source 1..23: mol_type = other DNA
gggtttcttcctgagccagcgct

SEQ ID NO: 97 - DNA, 21 bp, synthetic construct
  source 1..21: mol_type = other DNA
ctgaagaaggtgatgagacgg

SEQ ID NO: 98 - DNA, 21 bp, synthetic construct
  source 1..21: mol_type = other DNA
gaagaaggtgatgagacggat

SEQ ID NO: 99 - DNA, 21 bp, synthetic construct
  source 1..21: mol_type = other DNA
tgaagaggccagtgtgaagat

SEQ ID NO: 100 - DNA, 21 bp, synthetic construct
  source 1..21: mol_type = other DNA
aagaggccagtgtgaagatgc

SEQ ID NO: 101 - DNA, 21 bp, synthetic construct
  source 1..21: mol_type = other DNA
gctgcccacctacgtgcgctc

SEQ ID NO: 102 - DNA, 21 bp, synthetic construct
  source 1..21: mol_type = other DNA
gtgaaggtgggagaaggtgag

SEQ ID NO: 103 - DNA, 21 bp, synthetic construct
  source 1..21: mol_type = other DNA
ggagcgtgaagaccaaacacc

SEQ ID NO: 104 - DNA, 21 bp, synthetic construct
  source 1..21: mol_type = other DNA
cgtgaagaccaaacaccagat

SEQ ID NO: 105 - DNA, 21 bp, synthetic construct
  source 1..21: mol_type = other DNA
tgaagaccaaacaccagatgt

SEQ ID NO: 106 - DNA, 21 bp, synthetic construct
  source 1..21: mol_type = other DNA
gaagaccaaacaccagatgta

SEQ ID NO: 107 - DNA, 21 bp, synthetic construct
  source 1..21: mol_type = other DNA
agaccaaacaccagatgtact

SEQ ID NO: 108 - DNA, 21 bp, synthetic construct
  source 1..21: mol_type = other DNA
tgaccggcactgctgagatgc

SEQ ID NO: 109 - DNA, 21 bp, synthetic construct
  source 1..21: mol_type = other DNA
gaccggcactgctgagatgct

SEQ ID NO: 110 - DNA, 21 bp, synthetic construct
  source 1..21: mol_type = other DNA
cactgctgagatgctcttcga

SEQ ID NO: 111 - DNA, 21 bp, synthetic construct
  source 1..21: mol_type = other DNA
actgctgagatgctcttcgac

SEQ ID NO: 112 - DNA, 21 bp, synthetic construct
  source 1..21: mol_type = other DNA
tgagatgctcttcgactacat

SEQ ID NO: 113 - DNA, 21 bp, synthetic construct
  source 1..21: mol_type = other DNA
tcctggacaagcatcagatga

SEQ ID NO: 114 - DNA, 21 bp, synthetic construct
  source 1..21: mol_type = other DNA
gaagacatcgataagggcatc

SEQ ID NO: 115 - DNA, 21 bp, synthetic construct
  source 1..21: mol_type = other DNA
agacatcgataagggcatcct

SEQ ID NO: 116 - DNA, 21 bp, synthetic construct
  source 1..21: mol_type = other DNA
gataagggcatccttctcaac

SEQ ID NO: 117 - DNA, 21 bp, synthetic construct
  source 1..21: mol_type = other DNA
agggcatccttctcaactgga

SEQ ID NO: 118 - DNA, 21 bp, synthetic construct
  source 1..21: mol_type = other DNA
gcatccttctcaactggacca

SEQ ID NO: 119 - DNA, 21 bp, synthetic construct
  source 1..21: mol_type = other DNA
caggagcagaagggaacaatg

SEQ ID NO: 120 - DNA, 21 bp, synthetic construct
  source 1..21: mol_type = other DNA
ggagcagaagggaacaatgtc

SEQ ID NO: 121 - DNA, 21 bp, synthetic construct
  source 1..21: mol_type = other DNA
gagcagaagggaacaatgtcg

SEQ ID NO: 122 - DNA, 21 bp, synthetic construct
  source 1..21: mol_type = other DNA
agcagaagggaacaatgtcgt

SEQ ID NO: 123 - DNA, 21 bp, synthetic construct
  source 1..21: mol_type = other DNA
cagaagggaacaatgtcgtgg

SEQ ID NO: 124 - DNA, 21 bp, synthetic construct
  source 1..21: mol_type = other DNA
agaagggaacaatgtcgtggg

SEQ ID NO: 125 - DNA, 21 bp, synthetic construct
  source 1..21: mol_type = other DNA
aatggatgtggtggcaatggt

SEQ ID NO: 126 - DNA, 21 bp, synthetic construct
  source 1..21: mol_type = other DNA
gatgtggtggcaatggtgaat

SEQ ID NO: 127 - DNA, 21 bp, synthetic construct
  source 1..21: mol_type = other DNA
atgtggtggcaatggtgaatg

SEQ ID NO: 128 - DNA, 21 bp, synthetic construct
  source 1..21: mol_type = other DNA
tgtggtggcaatggtgaatga

SEQ ID NO: 129 - DNA, 21 bp, synthetic construct
  source 1..21: mol_type = other DNA
ggtggcaatggtgaatgacac

SEQ ID NO: 130 - DNA, 21 bp, synthetic construct
  source 1..21: mol_type = other DNA
ggcaatggtgaatgacacggt

SEQ ID NO: 131 - DNA, 21 bp, synthetic construct
  source 1..21: mol_type = other DNA
gcaatggtgaatgacacggtg

SEQ ID NO: 132 - DNA, 21 bp, synthetic construct
  source 1..21: mol_type = other DNA
atggtgaatgacacggtggcc

SEQ ID NO: 133 - DNA, 21 bp, synthetic construct
  source 1..21: mol_type = other DNA
tggtgaatgacacggtggcca

SEQ ID NO: 134 - DNA, 21 bp, synthetic construct
  source 1..21: mol_type = other DNA
ccacgatgatctcctgctact

SEQ ID NO: 135 - DNA, 21 bp, synthetic construct
  source 1..21: mol_type = other DNA
cacgatgatctcctgctacta

SEQ ID NO: 136 - DNA, 21 bp, synthetic construct
  source 1..21: mol_type = other DNA
acgatgatctcctgctactac

SEQ ID NO: 137 - DNA, 21 bp, synthetic construct
  source 1..21: mol_type = other DNA
cgatgatctcctgctactacg

SEQ ID NO: 138 - DNA, 21 bp, synthetic construct
  source 1..21: mol_type = other DNA
gatgatctcctgctactacga

SEQ ID NO: 139 - DNA, 21 bp, synthetic construct
  source 1..21: mol_type = other DNA
tgatctcctgctactacgaag

SEQ ID NO: 140 - DNA, 21 bp, synthetic construct
  source 1..21: mol_type = other DNA
gatctcctgctactacgaaga

SEQ ID NO: 141 - DNA, 21 bp, synthetic construct
  source 1..21: mol_type = other DNA
ctactacgaagaccatcagtg

SEQ ID NO: 142 - DNA, 21 bp, synthetic construct
  source 1..21: mol_type = other DNA
tactacgaagaccatcagtgc

SEQ ID NO: 143 - DNA, 21 bp, synthetic construct
  source 1..21: mol_type = other DNA
tacgaagaccatcagtgcgag

SEQ ID NO: 144 - DNA, 21 bp, synthetic construct
  source 1..21: mol_type = other DNA
gaagaccatcagtgcgaggtc

SEQ ID NO: 145 - DNA, 21 bp, synthetic construct
  source 1..21: mol_type = other DNA
agaccatcagtgcgaggtcgg

SEQ ID NO: 146 - DNA, 21 bp, synthetic construct
  source 1..21: mol_type = other DNA
accatcagtgcgaggtcggca

SEQ ID NO: 147 - DNA, 21 bp, synthetic construct
  source 1..21: mol_type = other DNA
catcagtgcgaggtcggcatg

SEQ ID NO: 148 - DNA, 21 bp, synthetic construct
  source 1..21: mol_type = other DNA
tcagtgcgaggtcggcatgat

SEQ ID NO: 149 - DNA, 21 bp, synthetic construct
  source 1..21: mol_type = other DNA
tggaggagatgcagaatgtgg

SEQ ID NO: 150 - DNA, 21 bp, synthetic construct
  source 1..21: mol_type = other DNA
cctgctggagtatgaccgcct

SEQ ID NO: 151 - DNA, 21 bp, synthetic construct
  source 1..21: mol_type = other DNA
ggagtatgaccgcctggtgga

SEQ ID NO: 152 - DNA, 21 bp, synthetic construct
  source 1..21: mol_type = other DNA
gagtatgaccgcctggtggac

SEQ ID NO: 153 - DNA, 21 bp, synthetic construct
  source 1..21: mol_type = other DNA
agtatgaccgcctggtggacg

SEQ ID NO: 154 - DNA, 21 bp, synthetic construct
  source 1..21: mol_type = other DNA
gtatgaccgcctggtggacga

SEQ ID NO: 155 - DNA, 21 bp, synthetic construct
  source 1..21: mol_type = other DNA
tatgaccgcctggtggacgag

SEQ ID NO: 156 - DNA, 21 bp, synthetic construct
  source 1..21: mol_type = other DNA
cagcagctgtatgagaagctc

SEQ ID NO: 157 - DNA, 21 bp, synthetic construct
  source 1..21: mol_type = other DNA
gctgtatgagaagctcatagg

SEQ ID NO: 158 - DNA, 21 bp, synthetic construct
  source 1..21: mol_type = other DNA
tgtatgagaagctcataggtg

SEQ ID NO: 159 - DNA, 21 bp, synthetic construct
  source 1..21: mol_type = other DNA
gtatgagaagctcataggtgg

SEQ ID NO: 160 - DNA, 21 bp, synthetic construct
  source 1..21: mol_type = other DNA
tatgagaagctcataggtggc

SEQ ID NO: 161 - DNA, 21 bp, synthetic construct
  source 1..21: mol_type = other DNA
atgagaagctcataggtggca

SEQ ID NO: 162 - DNA, 21 bp, synthetic construct
  source 1..21: mol_type = other DNA
aagctcataggtggcaagtac

SEQ ID NO: 163 - DNA, 21 bp, synthetic construct
  source 1..21: mol_type = other DNA
agctcataggtggcaagtaca

SEQ ID NO: 164 - DNA, 21 bp, synthetic construct
  source 1..21: mol_type = other DNA
tcataggtggcaagtacatgg

SEQ ID NO: 165 - DNA, 21 bp, synthetic construct
  source 1..21: mol_type = other DNA
aggtggcaagtacatgggcga

SEQ ID NO: 166 - DNA, 21 bp, synthetic construct
  source 1..21: mol_type = other DNA
gtggcaagtacatgggcgagc

SEQ ID NO: 167 - DNA, 21 bp, synthetic construct
  source 1..21: mol_type = other DNA
ggcaagtacatgggcgagctg

SEQ ID NO: 168 - DNA, 21 bp, synthetic construct
  source 1..21: mol_type = other DNA
gctgctcaggctcgtggacga

SEQ ID NO: 169 - DNA, 21 bp, synthetic construct
  source 1..21: mol_type = other DNA
ctgctcaggctcgtggacgaa

SEQ ID NO: 170 - DNA, 21 bp, synthetic construct
  source 1..21: mol_type = other DNA
cgaccgcaagcagatctacaa

SEQ ID NO: 171 - DNA, 21 bp, synthetic construct
  source 1..21: mol_type = other DNA
agcagatctacaacatcctga

SEQ ID NO: 172 - DNA, 21 bp, synthetic construct
  source 1..21: mol_type = other DNA
atctacaacatcctgagcacg

SEQ ID NO: 173 - DNA, 21 bp, synthetic construct
  source 1..21: mol_type = other DNA
ctacaacatcctgagcacgct

SEQ ID NO: 174 - DNA, 21 bp, synthetic construct
  source 1..21: mol_type = other DNA
atgcgcatcactgtgggcgtg

SEQ ID NO: 175 - DNA, 21 bp, synthetic construct
  source 1..21: mol_type = other DNA
tcactgtgggcgtggatggct

SEQ ID NO: 176 - DNA, 21 bp, synthetic construct
  source 1..21: mol_type = other DNA
cactgtgggcgtggatggctc

SEQ ID NO: 177 - DNA, 21 bp, synthetic construct
  source 1..21: mol_type = other DNA
actgtgggcgtggatggctcc

SEQ ID NO: 178 - DNA, 21 bp, synthetic construct
  source 1..21: mol_type = other DNA
tgggcgtggatggctccgtgt

SEQ ID NO: 179 - DNA, 21 bp, synthetic construct
  source 1..21: mol_type = other DNA
ggcgtggatggctccgtgtac

SEQ ID NO: 180 - DNA, 21 bp, synthetic construct
  source 1..21: mol_type = other DNA
gcgtggatggctccgtgtaca

SEQ ID NO: 181 - DNA, 21 bp, synthetic construct
  source 1..21: mol_type = other DNA
ggatggctccgtgtacaagct

SEQ ID NO: 182 - DNA, 21 bp, synthetic construct
  source 1..21: mol_type = other DNA
gacgcccagctgcgagatcac

SEQ ID NO: 183 - DNA, 21 bp, synthetic construct
  source 1..21: mol_type = other DNA
cgagatcaccttcatcgagtc

SEQ ID NO: 184 - DNA, 21 bp, synthetic construct
  source 1..21: mol_type = other DNA
gatcaccttcatcgagtcgga

SEQ ID NO: 185 - DNA, 21 bp, synthetic construct
  source 1..21: mol_type = other DNA
atcaccttcatcgagtcggag

SEQ ID NO: 186 - DNA, 21 bp, synthetic construct
  source 1..21: mol_type = other DNA
gatgcatttccacactgtcag

SEQ ID NO: 187 - DNA, 21 bp, synthetic construct
  source 1..21: mol_type = other DNA
tgggaactcatcctgtgtggg

SEQ ID NO: 188 - DNA, 21 bp, synthetic construct
  source 1..21: mol_type = other DNA
gcagctccaacagcttgacca

SEQ ID NO: 189 - DNA, 21 bp, synthetic construct
  source 1..21: mol_type = other DNA
ccaacagcttgaccagaccta

SEQ ID NO: 190 - DNA, 21 bp, synthetic construct
  source 1..21: mol_type = other DNA
gcttgtgattctgggatggac

SEQ ID NO: 191 - DNA, 21 bp, synthetic construct
  source 1..21: mol_type = other DNA
cttgtgattctgggatggacc

SEQ ID NO: 192 - DNA, 21 bp, synthetic construct
  source 1..21: mol_type = other DNA
cgctggctcaggaagaaaccc

SEQ ID NO: 193 - RNA, 23 nt, synthetic construct
  source 1..23: mol_type = other RNA
  modified_base 1: mod_base = OTHER; note = 2'-O-methyl modified nucleotide with 3'-phosphorothioate linkage
  modified_base 2: mod_base = OTHER; note = 2'-fluoro modified nucleotide with 3'-phosphorothioate linkage
  modified_base 3: mod_base = OTHER; note = 2'-O-methyl modified nucleotide
  modified_base 4: mod_base = OTHER; note = 2'-O-methyl modified nucleotide
  modified_base 5: mod_base = OTHER; note = 2'-O-methyl modified nucleotide
  modified_base 6: mod_base = OTHER; note = 2'-fluoro modified nucleotide
  modified_base 7: mod_base = OTHER; note = 2'-O-methyl modified nucleotide
  modified_base 8: mod_base = OTHER; note = 2'-O-methyl modified nucleotide
  modified_base 9: mod_base = OTHER; note = 2'-O-methyl modified nucleotide
  modified_base 10: mod_base = OTHER; note = 2'-O-methyl modified nucleotide
  modified_base 11: mod_base = OTHER; note = 2'-O-methyl modified nucleotide
  modified_base 12: mod_base = OTHER; note = 2'-O-methyl modified nucleotide
  modified_base 13: mod_base = OTHER; note = 2'-O-methyl modified nucleotide
  modified_base 14: mod_base = OTHER; note = 2'-fluoro modified nucleotide
  modified_base 15: mod_base = OTHER; note = 2'-O-methyl modified nucleotide
  modified_base 16: mod_base = OTHER; note = 2'-fluoro modified nucleotide
  modified_base 17: mod_base = OTHER; note = 2'-O-methyl modified nucleotide
  modified_base 18: mod_base = OTHER; note = 2'-O-methyl modified nucleotide
  modified_base 19: mod_base = OTHER; note = 2'-O-methyl modified nucleotide
  modified_base 20: mod_base = OTHER; note = 2'-O-methyl modified nucleotide
  modified_base 21: mod_base = OTHER; note = 2'-O-methyl modified nucleotide with 3'-phosphorothioate linkage
  modified_base 22: mod_base = OTHER; note = 2'-O-methyl modified nucleotide with 3'-phosphorothioate linkage
  modified_base 23: mod_base = OTHER; note = 2'-O-methyl modified nucleotide
ccgtctcatcaccttcttcaggt

SEQ ID NO: 194 - RNA, 23 nt, synthetic construct
  source 1..23: mol_type = other RNA
  modified_base 1: mod_base = OTHER; note = 2'-O-methyl modified nucleotide with 3'-phosphorothioate linkage
  modified_base 2: mod_base = OTHER; note = 2'-fluoro modified nucleotide with 3'-phosphorothioate linkage
  modified_base 3: mod_base = OTHER; note = 2'-O-methyl modified nucleotide
  modified_base 4: mod_base = OTHER; note = 2'-O-methyl modified nucleotide
  modified_base 5: mod_base = OTHER; note = 2'-O-methyl modified nucleotide
  modified_base 6: mod_base = OTHER; note = 2'-fluoro modified nucleotide
  modified_base 7: mod_base = OTHER; note = 2'-O-methyl modified nucleotide
  modified_base 8: mod_base = OTHER; note = 2'-O-methyl modified nucleotide
  modified_base 9: mod_base = OTHER; note = 2'-O-methyl modified nucleotide
  modified_base 10: mod_base = OTHER; note = 2'-O-methyl modified nucleotide
  modified_base 11: mod_base = OTHER; note = 2'-O-methyl modified nucleotide
  modified_base 12: mod_base = OTHER; note = 2'-O-methyl modified nucleotide
  modified_base 13: mod_base = OTHER; note = 2'-O-methyl modified nucleotide
  modified_base 14: mod_base = OTHER; note = 2'-fluoro modified nucleotide
  modified_base 15: mod_base = OTHER; note = 2'-O-methyl modified nucleotide
  modified_base 16: mod_base = OTHER; note = 2'-fluoro modified nucleotide
  modified_base 17: mod_base = OTHER; note = 2'-O-methyl modified nucleotide
  modified_base 18: mod_base = OTHER; note = 2'-O-methyl modified nucleotide
  modified_base 19: mod_base = OTHER; note = 2'-O-methyl modified nucleotide
  modified_base 20: mod_base = OTHER; note = 2'-O-methyl modified nucleotide
  modified_base 21: mod_base = OTHER; note = 2'-O-methyl modified nucleotide with 3'-phosphorothioate linkage
  modified_base 22: mod_base = OTHER; note = 2'-O-methyl modified nucleotide with 3'-phosphorothioate linkage
  modified_base 23: mod_base = OTHER; note = 2'-O-methyl modified nucleotide
atccgtctcatcaccttcttcag

SEQ ID NO: 195 - RNA, 23 nt, synthetic construct
  source 1..23: mol_type = other RNA
  modified_base 1: mod_base = OTHER; note = 2'-O-methyl modified nucleotide with 3'-phosphorothioate linkage
  modified_base 2: mod_base = OTHER; note = 2'-fluoro modified nucleotide with 3'-phosphorothioate linkage
  modified_base 3: mod_base = OTHER; note = 2'-O-methyl modified nucleotide
  modified_base 4: mod_base = OTHER; note = 2'-O-methyl modified nucleotide
  modified_base 5: mod_base = OTHER; note = 2'-O-methyl modified nucleotide
  modified_base 6: mod_base = OTHER; note = 2'-fluoro modified nucleotide
  modified_base 7: mod_base = OTHER; note = 2'-O-methyl modified nucleotide
  modified_base 8: mod_base = OTHER; note = 2'-O-methyl modified nucleotide
  modified_base 9: mod_base = OTHER; note = 2'-O-methyl modified nucleotide
  modified_base 10: mod_base = OTHER; note = 2'-O-methyl modified nucleotide
  modified_base 11: mod_base = OTHER; note = 2'-O-methyl modified nucleotide
  modified_base 12: mod_base = OTHER; note = 2'-O-methyl modified nucleotide
  modified_base 13: mod_base = OTHER; note = 2'-O-methyl modified nucleotide
  modified_base 14: mod_base = OTHER; note = 2'-fluoro modified nucleotide
  modified_base 15: mod_base = OTHER; note = 2'-O-methyl modified nucleotide
  modified_base 16: mod_base = OTHER; note = 2'-fluoro modified nucleotide
  modified_base 17: mod_base = OTHER; note = 2'-O-methyl modified nucleotide
  modified_base 18: mod_base = OTHER; note = 2'-O-methyl modified nucleotide
  modified_base 19: mod_base = OTHER; note = 2'-O-methyl modified nucleotide
  modified_base 20: mod_base = OTHER; note = 2'-O-methyl modified nucleotide
  modified_base 21: mod_base = OTHER; note = 2'-O-methyl modified nucleotide with 3'-phosphorothioate linkage
  modified_base 22: mod_base = OTHER; note = 2'-O-methyl modified nucleotide with 3'-phosphorothioate linkage
  modified_base 23: mod_base = OTHER; note = 2'-O-methyl modified nucleotide
atcttcacactggcctcttcatg

SEQ ID NO: 196 - RNA, 23 nt, synthetic construct
  source 1..23: mol_type = other RNA
  modified_base 1: mod_base = OTHER; note = 2'-O-methyl modified nucleotide with 3'-phosphorothioate linkage
  modified_base 2: mod_base = OTHER; note = 2'-fluoro modified nucleotide with 3'-phosphorothioate linkage
  modified_base 3: mod_base = OTHER; note = 2'-O-methyl modified nucleotide
  modified_base 4: mod_base = OTHER; note = 2'-O-methyl modified nucleotide
  modified_base 5: mod_base = OTHER; note = 2'-O-methyl modified nucleotide
  modified_base 6: mod_base = OTHER; note = 2'-fluoro modified nucleotide
  modified_base 7: mod_base = OTHER; note = 2'-O-methyl modified nucleotide
  modified_base 8: mod_base = OTHER; note = 2'-O-methyl modified nucleotide
  modified_base 9: mod_base = OTHER; note = 2'-O-methyl modified nucleotide
  modified_base 10: mod_base = OTHER; note = 2'-O-methyl modified nucleotide
  modified_base 11: mod_base = OTHER; note = 2'-O-methyl modified nucleotide
  modified_base 12: mod_base = OTHER; note = 2'-O-methyl modified nucleotide
  modified_base 13: mod_base = OTHER; note = 2'-O-methyl modified nucleotide
  modified_base 14: mod_base = OTHER; note = 2'-fluoro modified nucleotide
  modified_base 15: mod_base = OTHER; note = 2'-O-methyl modified nucleotide
  modified_base 16: mod_base = OTHER; note = 2'-fluoro modified nucleotide
  modified_base 17: mod_base = OTHER; note = 2'-O-methyl modified nucleotide
  modified_base 18: mod_base = OTHER; note = 2'-O-methyl modified nucleotide
  modified_base 19: mod_base = OTHER; note = 2'-O-methyl modified nucleotide
  modified_base 20: mod_base = OTHER; note = 2'-O-methyl modified nucleotide
  modified_base 21: mod_base = OTHER; note = 2'-O-methyl modified nucleotide with 3'-phosphorothioate linkage
  modified_base 22: mod_base = OTHER; note = 2'-O-methyl modified nucleotide with 3'-phosphorothioate linkage
  modified_base 23: mod_base = OTHER; note = 2'-O-methyl modified nucleotide
gcatcttcacactggcctcttca

SEQ ID NO: 197 - RNA, 23 nt, synthetic construct
  source 1..23: mol_type = other RNA
  modified_base 1: mod_base = OTHER; note = 2'-O-methyl modified nucleotide with 3'-phosphorothioate linkage
  modified_base 2: mod_base = OTHER; note = 2'-fluoro modified nucleotide with 3'-phosphorothioate linkage
  modified_base 3: mod_base = OTHER; note = 2'-O-methyl modified nucleotide
  modified_base 4: mod_base = OTHER; note = 2'-O-methyl modified nucleotide
  modified_base 5: mod_base = OTHER; note = 2'-O-methyl modified nucleotide
  modified_base 6: mod_base = OTHER; note = 2'-fluoro modified nucleotide
  modified_base 7: mod_base = OTHER; note = 2'-O-methyl modified nucleotide
  modified_base 8: mod_base = OTHER; note = 2'-O-methyl modified nucleotide
  modified_base 9: mod_base = OTHER; note = 2'-O-methyl modified nucleotide
  modified_base 10: mod_base = OTHER; note = 2'-O-methyl modified nucleotide
  modified_base 11: mod_base = OTHER; note = 2'-O-methyl modified nucleotide
  modified_base 12: mod_base = OTHER; note = 2'-O-methyl modified nucleotide
  modified_base 13: mod_base = OTHER; note = 2'-O-methyl modified nucleotide
  modified_base 14: mod_base = OTHER; note = 2'-fluoro modified nucleotide
  modified_base 15: mod_base = OTHER; note = 2'-O-methyl modified nucleotide
  modified_base 16: mod_base = OTHER; note = 2'-fluoro modified nucleotide
  modified_base 17: mod_base = OTHER; note = 2'-O-methyl modified nucleotide
  modified_base 18: mod_base = OTHER; note = 2'-O-methyl modified nucleotide
  modified_base 19: mod_base = OTHER; note = 2'-O-methyl modified nucleotide
  modified_base 20: mod_base = OTHER; note = 2'-O-methyl modified nucleotide
  modified_base 21: mod_base = OTHER; note = 2'-O-methyl modified nucleotide with 3'-phosphorothioate linkage
  modified_base 22: mod_base = OTHER; note = 2'-O-methyl modified nucleotide with 3'-phosphorothioate linkage
  modified_base 23: mod_base = OTHER; note = 2'-O-methyl modified nucleotide
gagcgcacgtaggtgggcagcat

SEQ ID NO: 198 - RNA, 23 nt, synthetic construct
  source 1..23: mol_type = other RNA
  modified_base 1: mod_base = OTHER; note = 2'-O-methyl modified nucleotide with 3'-phosphorothioate linkage
  modified_base 2: mod_base = OTHER; note = 2'-fluoro modified nucleotide with 3'-phosphorothioate linkage
  modified_base 3: mod_base = OTHER; note = 2'-O-methyl modified nucleotide
  modified_base 4: mod_base = OTHER; note = 2'-O-methyl modified nucleotide
  modified_base 5: mod_base = OTHER; note = 2'-O-methyl modified nucleotide
  modified_base 6: mod_base = OTHER; note = 2'-fluoro modified nucleotide
  modified_base 7: mod_base = OTHER; note = 2'-O-methyl modified nucleotide
  modified_base 8: mod_base = OTHER; note = 2'-O-methyl modified nucleotide
  modified_base 9: mod_base = OTHER; note = 2'-O-methyl modified nucleotide
  modified_base 10: mod_base = OTHER; note = 2'-O-methyl modified nucleotide
  modified_base 11: mod_base = OTHER; note = 2'-O-methyl modified nucleotide
  modified_base 12: mod_base = OTHER; note = 2'-O-methyl modified nucleotide
  modified_base 13: mod_base = OTHER; note = 2'-O-methyl modified nucleotide
  modified_base 14: mod_base = OTHER; note = 2'-fluoro modified nucleotide
  modified_base 15: mod_base = OTHER; note = 2'-O-methyl modified nucleotide
  modified_base 16: mod_base = OTHER; note = 2'-fluoro modified nucleotide
  modified_base 17: mod_base = OTHER; note = 2'-O-methyl modified nucleotide
  modified_base 18: mod_base = OTHER; note = 2'-O-methyl modified nucleotide
  modified_base 19: mod_base = OTHER; note = 2'-O-methyl modified nucleotide
  modified_base 20: mod_base = OTHER; note = 2'-O-methyl modified nucleotide
  modified_base 21: mod_base = OTHER; note = 2'-O-methyl modified nucleotide with 3'-phosphorothioate linkage
  modified_base 22: mod_base = OTHER; note = 2'-O-methyl modified nucleotide with 3'-phosphorothioate linkage
  modified_base 23: mod_base = OTHER; note = 2'-O-methyl modified nucleotide
ctcaccttctcccaccttcacca

SEQ ID NO: 199 - RNA, 23 nt, synthetic construct
  source 1..23: mol_type = other RNA
  modified_base 1: mod_base = OTHER; note = 2'-O-methyl modified nucleotide with 3'-phosphorothioate linkage
  modified_base 2: mod_base = OTHER; note = 2'-fluoro modified nucleotide with 3'-phosphorothioate linkage
  modified_base 3: mod_base = OTHER; note = 2'-O-methyl modified nucleotide
  modified_base 4: mod_base = OTHER; note = 2'-O-methyl modified nucleotide
  modified_base 5: mod_base = OTHER; note = 2'-O-methyl modified nucleotide
  modified_base 6: mod_base = OTHER; note = 2'-fluoro modified nucleotide
  modified_base 7: mod_base = OTHER; note = 2'-O-methyl modified nucleotide
  modified_base 8: mod_base = OTHER; note = 2'-O-methyl modified nucleotide
  modified_base 9: mod_base = OTHER; note = 2'-O-methyl modified nucleotide
  modified_base 10: mod_base = OTHER; note = 2'-O-methyl modified nucleotide
  modified_base 11: mod_base = OTHER; note = 2'-O-methyl modified nucleotide
  modified_base 12: mod_base = OTHER; note = 2'-O-methyl modified nucleotide
  modified_base 13: mod_base = OTHER; note = 2'-O-methyl modified nucleotide
  modified_base 14: mod_base = OTHER; note = 2'-fluoro modified nucleotide
  modified_base 15: mod_base = OTHER; note = 2'-O-methyl modified nucleotide
  modified_base 16: mod_base = OTHER; note = 2'-fluoro modified nucleotide
  modified_base 17: mod_base = OTHER; note = 2'-O-methyl modified nucleotide
  modified_base 18: mod_base = OTHER; note = 2'-O-methyl modified nucleotide
  modified_base 19: mod_base = OTHER; note = 2'-O-methyl modified nucleotide
  modified_base 20: mod_base = OTHER; note = 2'-O-methyl modified nucleotide
  modified_base 21: mod_base = OTHER; note = 2'-O-methyl modified nucleotide with 3'-phosphorothioate linkage
  modified_base 22: mod_base = OTHER; note = 2'-O-methyl modified nucleotide with 3'-phosphorothioate linkage
  modified_base 23: mod_base = OTHER; note = 2'-O-methyl modified nucleotide
ggtgtttggtcttcacgctccac

SEQ ID NO: 200 - RNA, 23 nt, synthetic construct
  source 1..23: mol_type = other RNA
  modified_base 1: mod_base = OTHER; note = 2'-O-methyl modified nucleotide with 3'-phosphorothioate linkage
  modified_base 2: mod_base = OTHER; note = 2'-fluoro modified nucleotide with 3'-phosphorothioate linkage
  modified_base 3: mod_base = OTHER; note = 2'-O-methyl modified nucleotide
  modified_base 4: mod_base = OTHER; note = 2'-O-methyl modified nucleotide
  modified_base 5: mod_base = OTHER; note = 2'-O-methyl modified nucleotide
  modified_base 6: mod_base = OTHER; note = 2'-fluoro modified nucleotide
  modified_base 7: mod_base = OTHER; note = 2'-O-methyl modified nucleotide
  modified_base 8: mod_base = OTHER; note = 2'-O-methyl modified nucleotide
  modified_base 9: mod_base = OTHER; note = 2'-O-methyl modified nucleotide
  modified_base 10: mod_base = OTHER; note = 2'-O-methyl modified nucleotide
  modified_base 11: mod_base = OTHER; note = 2'-O-methyl modified nucleotide
  modified_base 12: mod_base = OTHER; note = 2'-O-methyl modified nucleotide
  modified_base 13: mod_base = OTHER; note = 2'-O-methyl modified nucleotide
  modified_base 14: mod_base = OTHER; note = 2'-fluoro modified nucleotide
  modified_base 15: mod_base = OTHER; note = 2'-O-methyl modified nucleotide
  modified_base 16: mod_base = OTHER; note = 2'-fluoro modified nucleotide
  modified_base 17: mod_base = OTHER; note = 2'-O-methyl modified nucleotide
  modified_base 18: mod_base = OTHER; note = 2'-O-methyl modified nucleotide
  modified_base 19: mod_base = OTHER; note = 2'-O-methyl modified nucleotide
  modified_base 20: mod_base = OTHER; note = 2'-O-methyl modified nucleotide
  modified_base 21: mod_base = OTHER; note = 2'-O-methyl modified nucleotide with 3'-phosphorothioate linkage
  modified_base 22: mod_base = OTHER; note = 2'-O-methyl modified nucleotide with 3'-phosphorothioate linkage
  modified_base 23: mod_base = OTHER; note = 2'-O-methyl modified nucleotide
atctggtgtttggtcttcacgct

SEQ ID NO: 201 - RNA, 23 nt, synthetic construct
  source 1..23: mol_type = other RNA
  modified_base 1: mod_base = OTHER; note = 2'-O-methyl modified nucleotide with 3'-phosphorothioate linkage
  modified_base 2: mod_base = OTHER; note = 2'-fluoro modified nucleotide with 3'-phosphorothioate linkage
  modified_base 3: mod_base = OTHER; note = 2'-O-methyl modified nucleotide
  modified_base 4: mod_base = OTHER; note = 2'-O-methyl modified nucleotide
  modified_base 5: mod_base = OTHER; note = 2'-O-methyl modified nucleotide
  modified_base 6: mod_base = OTHER; note = 2'-fluoro modified nucleotide
  modified_base 7: mod_base = OTHER; note = 2'-O-methyl modified nucleotide
  modified_base 8: mod_base = OTHER; note = 2'-O-methyl modified nucleotide
  modified_base 9: mod_base = OTHER; note = 2'-O-methyl modified nucleotide
  modified_base 10: mod_base = OTHER; note = 2'-O-methyl modified nucleotide
  modified_base 11: mod_base = OTHER; note = 2'-O-methyl modified nucleotide
  modified_base 12: mod_base = OTHER; note = 2'-O-methyl modified nucleotide
  modified_base 13: mod_base = OTHER; note = 2'-O-methyl modified nucleotide
  modified_base 14: mod_base = OTHER; note = 2'-fluoro modified nucleotide
  modified_base 15: mod_base = OTHER; note = 2'-O-methyl modified nucleotide
  modified_base 16: mod_base = OTHER; note = 2'-fluoro modified nucleotide
  modified_base 17: mod_base = OTHER; note = 2'-O-methyl modified nucleotide
  modified_base 18: mod_base = OTHER; note = 2'-O-methyl modified nucleotide
  modified_base 19: mod_base = OTHER; note = 2'-O-methyl modified nucleotide
  modified_base 20: mod_base = OTHER; note = 2'-O-methyl modified nucleotide
  modified_base 21: mod_base = OTHER; note = 2'-O-methyl modified nucleotide with 3'-phosphorothioate linkage
  modified_base 22: mod_base = OTHER; note = 2'-O-methyl modified nucleotide with 3'-phosphorothioate linkage
  modified_base 23: mod_base = OTHER; note = 2'-O-methyl modified nucleotide
acatctggtgtttggtcttcacg

SEQ ID NO: 202 - RNA, 23 nt, synthetic construct
  source 1..23: mol_type = other RNA
  modified_base 1: mod_base = OTHER; note = 2'-O-methyl modified nucleotide with 3'-phosphorothioate linkage
  modified_base 2: mod_base = OTHER; note = 2'-fluoro modified nucleotide with 3'-phosphorothioate linkage
  modified_base 3: mod_base = OTHER; note = 2'-O-methyl modified nucleotide
  modified_base 4: mod_base = OTHER; note = 2'-O-methyl modified nucleotide
  modified_base 5: mod_base = OTHER; note = 2'-O-methyl modified nucleotide
  modified_base 6: mod_base = OTHER; note = 2'-fluoro modified nucleotide
  modified_base 7: mod_base = OTHER; note = 2'-O-methyl modified nucleotide
  modified_base 8: mod_base = OTHER; note = 2'-O-methyl modified nucleotide
  modified_base 9: mod_base = OTHER; note = 2'-O-methyl modified nucleotide
  modified_base 10: mod_base = OTHER; note = 2'-O-methyl modified nucleotide
  modified_base 11: mod_base = OTHER; note = 2'-O-methyl modified nucleotide
  modified_base 12: mod_base = OTHER; note = 2'-O-methyl modified nucleotide
  modified_base 13: mod_base = OTHER; note = 2'-O-methyl modified nucleotide
  modified_base 14: mod_base = OTHER; note = 2'-fluoro modified nucleotide
  modified_base 15: mod_base = OTHER; note = 2'-O-methyl modified nucleotide
  modified_base 16: mod_base = OTHER; note = 2'-fluoro modified nucleotide
  modified_base 17: mod_base = OTHER; note = 2'-O-methyl modified nucleotide
  modified_base 18: mod_base = OTHER; note = 2'-O-methyl modified nucleotide
  modified_base 19: mod_base = OTHER; note = 2'-O-methyl modified nucleotide
  modified_base 20: mod_base = OTHER; note = 2'-O-methyl modified nucleotide
  modified_base 21: mod_base = OTHER; note = 2'-O-methyl modified nucleotide with 3'-phosphorothioate linkage
  modified_base 22: mod_base = OTHER; note = 2'-O-methyl modified nucleotide with 3'-phosphorothioate linkage
  modified_base 23: mod_base = OTHER; note = 2'-O-methyl modified nucleotide
tacatctggtgtttggtcttcac

SEQ ID NO: 203 - RNA, 23 nt, synthetic construct
  source 1..23: mol_type = other RNA
  modified_base 1: mod_base = OTHER; note = 2'-O-methyl modified nucleotide with 3'-phosphorothioate linkage
  modified_base 2: mod_base = OTHER; note = 2'-fluoro modified nucleotide with 3'-phosphorothioate linkage
  modified_base 3: mod_base = OTHER; note = 2'-O-methyl modified nucleotide
  modified_base 4: mod_base = OTHER; note = 2'-O-methyl modified nucleotide
  modified_base 5: mod_base = OTHER; note = 2'-O-methyl modified nucleotide
  modified_base 6: mod_base = OTHER; note = 2'-fluoro modified nucleotide
  modified_base 7: mod_base = OTHER; note = 2'-O-methyl modified nucleotide
  modified_base 8: mod_base = OTHER; note = 2'-O-methyl modified nucleotide
  modified_base 9: mod_base = OTHER; note = 2'-O-methyl modified nucleotide
  modified_base 10: mod_base = OTHER; note = 2'-O-methyl modified nucleotide
  modified_base 11: mod_base = OTHER; note = 2'-O-methyl modified nucleotide
  modified_base 12: mod_base = OTHER; note = 2'-O-methyl modified nucleotide
  modified_base 13: mod_base = OTHER; note = 2'-O-methyl modified nucleotide
  modified_base 14: mod_base = OTHER; note = 2'-fluoro modified nucleotide
  modified_base 15: mod_base = OTHER; note = 2'-O-methyl modified nucleotide
  modified_base 16: mod_base = OTHER; note = 2'-fluoro modified nucleotide
  modified_base 17: mod_base = OTHER; note = 2'-O-methyl modified nucleotide
  modified_base 18: mod_base = OTHER; note = 2'-O-methyl modified nucleotide
  modified_base 19: mod_base = OTHER; note = 2'-O-methyl modified nucleotide
  modified_base 20: mod_base = OTHER; note = 2'-O-methyl modified nucleotide
  modified_base 21: mod_base = OTHER; note = 2'-O-methyl modified nucleotide with 3'-phosphorothioate linkage
  modified_base 22: mod_base = OTHER; note = 2'-O-methyl modified nucleotide with 3'-phosphorothioate linkage
  modified_base 23: mod_base = OTHER; note = 2'-O-methyl modified nucleotide
agtacatctggtgtttggtcttc

SEQ ID NO: 204 - RNA, 23 nt, synthetic construct
  source 1..23: mol_type = other RNA
  modified_base 1: mod_base = OTHER; note = 2'-O-methyl modified nucleotide with 3'-phosphorothioate linkage
  modified_base 2: mod_base = OTHER; note = 2'-fluoro modified nucleotide with 3'-phosphorothioate linkage
  modified_base 3: mod_base = OTHER; note = 2'-O-methyl modified nucleotide
  modified_base 4: mod_base = OTHER; note = 2'-O-methyl modified nucleotide
  modified_base 5: mod_base = OTHER; note = 2'-O-methyl modified nucleotide
  modified_base 6: mod_base = OTHER; note = 2'-fluoro modified nucleotide
  modified_base 7: mod_base = OTHER; note = 2'-O-methyl modified nucleotide
  modified_base 8: mod_base = OTHER; note = 2'-O-methyl modified nucleotide
  modified_base 9: mod_base = OTHER; note = 2'-O-methyl modified nucleotide
  modified_base 10: mod_base = OTHER; note = 2'-O-methyl modified nucleotide
  modified_base 11: mod_base = OTHER; note = 2'-O-methyl modified nucleotide
  modified_base 12: mod_base = OTHER; note = 2'-O-methyl modified nucleotide
  modified_base 13: mod_base = OTHER; note = 2'-O-methyl modified nucleotide
  modified_base 14: mod_base = OTHER; note = 2'-fluoro modified nucleotide
  modified_base 15: mod_base = OTHER; note = 2'-O-methyl modified nucleotide
  modified_base 16: mod_base = OTHER; note = 2'-fluoro modified nucleotide
  modified_base 17: mod_base = OTHER; note = 2'-O-methyl modified nucleotide
  modified_base 18: mod_base = OTHER; note = 2'-O-methyl modified nucleotide
  modified_base 19: mod_base = OTHER; note = 2'-O-methyl modified nucleotide
  modified_base 20: mod_base = OTHER; note = 2'-O-methyl modified nucleotide
  modified_base 21: mod_base = OTHER; note = 2'-O-methyl modified nucleotide with 3'-phosphorothioate linkage
  modified_base 22: mod_base = OTHER; note = 2'-O-methyl modified nucleotide with 3'-phosphorothioate linkage
  modified_base 23: mod_base = OTHER; note = 2'-O-methyl modified nucleotide
gcatctcagcagtgccggtcatg

SEQ ID NO: 205 - RNA, 23 nt, synthetic construct
  source 1..23: mol_type = other RNA
  modified_base 1: mod_base = OTHER; note = 2'-O-methyl modified nucleotide with 3'-phosphorothioate linkage
  modified_base 2: mod_base = OTHER; note = 2'-fluoro modified nucleotide with 3'-phosphorothioate linkage
  modified_base 3: mod_base = OTHER; note = 2'-O-methyl modified nucleotide
  modified_base 4: mod_base = OTHER; note = 2'-O-methyl modified nucleotide
  modified_base 5: mod_base = OTHER; note = 2'-O-methyl modified nucleotide
  modified_base 6: mod_base = OTHER; note = 2'-fluoro modified nucleotide
  modified_base 7: mod_base = OTHER; note = 2'-O-methyl modified nucleotide
  modified_base 8: mod_base = OTHER; note = 2'-O-methyl modified nucleotide
  modified_base 9: mod_base = OTHER; note = 2'-O-methyl modified nucleotide
  modified_base 10: mod_base = OTHER; note = 2'-O-methyl modified nucleotide
  modified_base 11: mod_base = OTHER; note = 2'-O-methyl modified nucleotide
  modified_base 12: mod_base = OTHER; note = 2'-O-methyl modified nucleotide
  modified_base 13: mod_base = OTHER; note = 2'-O-methyl modified nucleotide
  modified_base 14: mod_base = OTHER; note = 2'-fluoro modified nucleotide
  modified_base 15: mod_base = OTHER; note = 2'-O-methyl modified nucleotide
  modified_base 16: mod_base = OTHER; note = 2'-fluoro modified nucleotide
  modified_base 17: mod_base = OTHER; note = 2'-O-methyl modified nucleotide
  modified_base 18: mod_base = OTHER; note = 2'-O-methyl modified nucleotide
  modified_base 19: mod_base = OTHER; note = 2'-O-methyl modified nucleotide
  modified_base 20: mod_base = OTHER; note = 2'-O-methyl modified nucleotide
  modified_base 21: mod_base = OTHER; note = 2'-O-methyl modified nucleotide with 3'-phosphorothioate linkage
  modified_base 22: mod_base = OTHER; note = 2'-O-methyl modified nucleotide with 3'-phosphorothioate linkage
  modified_base 23: mod_base = OTHER; note = 2'-O-methyl modified nucleotide
agcatctcagcagtgccggtcat

SEQ ID NO: 206 - RNA, 23 nt, synthetic construct
  source 1..23: mol_type = other RNA
  modified_base 1: mod_base = OTHER; note = 2'-O-methyl modified nucleotide with 3'-phosphorothioate linkage
  modified_base 2: mod_base = OTHER; note = 2'-fluoro modified nucleotide with 3'-phosphorothioate linkage
  modified_base 3: mod_base = OTHER; note = 2'-O-methyl modified nucleotide
  modified_base 4: mod_base = OTHER; note = 2'-O-methyl modified nucleotide
  modified_base 5: mod_base = OTHER; note = 2'-O-methyl modified nucleotide
  modified_base 6: mod_base = OTHER; note = 2'-fluoro modified nucleotide
  modified_base 7: mod_base = OTHER; note = 2'-O-methyl modified nucleotide
  modified_base 8: mod_base = OTHER; note = 2'-O-methyl modified nucleotide
  modified_base 9: mod_base = OTHER; note = 2'-O-methyl modified nucleotide
  modified_base 10: mod_base = OTHER; note = 2'-O-methyl modified nucleotide
  modified_base 11: mod_base = OTHER; note = 2'-O-methyl modified nucleotide
  modified_base 12: mod_base = OTHER; note = 2'-O-methyl modified nucleotide
  modified_base 13: mod_base = OTHER; note = 2'-O-methyl modified nucleotide
  modified_base 14: mod_base = OTHER; note = 2'-fluoro modified nucleotide
  modified_base 15: mod_base = OTHER; note = 2'-O-methyl modified nucleotide
  modified_base 16: mod_base = OTHER; note = 2'-fluoro modified nucleotide
  modified_base 17: mod_base = OTHER; note = 2'-O-methyl modified nucleotide
  modified_base 18: mod_base = OTHER; note = 2'-O-methyl modified nucleotide
  modified_base 19: mod_base = OTHER; note = 2'-O-methyl modified nucleotide
  modified_base 20: mod_base = OTHER; note = 2'-O-methyl modified nucleotide
  modified_base 21: mod_base = OTHER; note = 2'-O-methyl modified nucleotide with 3'-phosphorothioate linkage
  modified_base 22: mod_base = OTHER; note = 2'-O-methyl modified nucleotide with 3'-phosphorothioate linkage
  modified_base 23: mod_base = OTHER; note = 2'-O-methyl modified nucleotide
tcgaagagcatctcagcagtgcc

SEQ ID NO: 207 - RNA, 23 nt, synthetic construct
  source 1..23: mol_type = other RNA
  modified_base 1: mod_base = OTHER; note = 2'-O-methyl modified nucleotide with 3'-phosphorothioate linkage
  modified_base 2: mod_base = OTHER; note = 2'-fluoro modified nucleotide with 3'-phosphorothioate linkage
  modified_base 3: mod_base = OTHER; note = 2'-O-methyl modified nucleotide
  modified_base 4: mod_base = OTHER; note = 2'-O-methyl modified nucleotide
  modified_base 5: mod_base = OTHER; note = 2'-O-methyl modified nucleotide
  modified_base 6: mod_base = OTHER; note = 2'-fluoro modified nucleotide
  modified_base 7: mod_base = OTHER; note = 2'-O-methyl modified nucleotide
  modified_base 8: mod_base = OTHER; note = 2'-O-methyl modified nucleotide
  modified_base 9: mod_base = OTHER; note = 2'-O-methyl modified nucleotide
  modified_base 10: mod_base = OTHER; note = 2'-O-methyl modified nucleotide
  modified_base 11: mod_base = OTHER; note = 2'-O-methyl modified nucleotide
  modified_base 12: mod_base = OTHER; note = 2'-O-methyl modified nucleotide
  modified_base 13: mod_base = OTHER; note = 2'-O-methyl modified nucleotide
  modified_base 14: mod_base = OTHER; note = 2'-fluoro modified nucleotide
  modified_base 15: mod_base = OTHER; note = 2'-O-methyl modified nucleotide
  modified_base 16: mod_base = OTHER; note = 2'-fluoro modified nucleotide
  modified_base 17: mod_base = OTHER; note = 2'-O-methyl modified nucleotide
  modified_base 18: mod_base = OTHER; note = 2'-O-methyl modified nucleotide
  modified_base 19: mod_base = OTHER; note = 2'-O-methyl modified nucleotide
  modified_base 20: mod_base = OTHER; note = 2'-O-methyl modified nucleotide
  modified_base 21: mod_base = OTHER; note = 2'-O-methyl modified nucleotide with 3'-phosphorothioate linkage
  modified_base 22: mod_base = OTHER; note = 2'-O-methyl modified nucleotide with 3'-phosphorothioate linkage
  modified_base 23: mod_base = OTHER; note = 2'-O-methyl modified nucleotide
gtcgaagagcatctcagcagtgc

SEQ ID NO: 208 - RNA, 23 nt, synthetic construct
  source 1..23: mol_type = other RNA
  modified_base 1: mod_base = OTHER; note = 2'-O-methyl modified nucleotide with 3'-phosphorothioate linkage
  modified_base 2: mod_base = OTHER; note = 2'-fluoro modified nucleotide with 3'-phosphorothioate linkage
  modified_base 3: mod_base = OTHER; note = 2'-O-methyl modified nucleotide
  modified_base 4: mod_base = OTHER; note = 2'-O-methyl modified nucleotide
  modified_base 5: mod_base = OTHER; note = 2'-O-methyl modified nucleotide
  modified_base 6: mod_base = OTHER; note = 2'-fluoro modified nucleotide
  modified_base 7: mod_base = OTHER; note = 2'-O-methyl modified nucleotide
  modified_base 8: mod_base = OTHER; note = 2'-O-methyl modified nucleotide
  modified_base 9: mod_base = OTHER; note = 2'-O-methyl modified nucleotide
  modified_base 10: mod_base = OTHER; note = 2'-O-methyl modified nucleotide
  modified_base 11: mod_base = OTHER; note = 2'-O-methyl modified nucleotide
  modified_base 12: mod_base = OTHER; note = 2'-O-methyl modified nucleotide
  modified_base 13: mod_base = OTHER; note = 2'-O-methyl modified nucleotide
  modified_base 14: mod_base = OTHER; note = 2'-fluoro modified nucleotide
  modified_base 15: mod_base = OTHER; note = 2'-O-methyl modified nucleotide
  modified_base 16: mod_base = OTHER; note = 2'-fluoro modified nucleotide
  modified_base 17: mod_base = OTHER; note = 2'-O-methyl modified nucleotide
  modified_base 18: mod_base = OTHER; note = 2'-O-methyl modified nucleotide
  modified_base 19: mod_base = OTHER; note = 2'-O-methyl modified nucleotide
  modified_base 20: mod_base = OTHER; note = 2'-O-methyl modified nucleotide
  modified_base 21: mod_base = OTHER; note = 2'-O-methyl modified nucleotide with 3'-phosphorothioate linkage
  modified_base 22: mod_base = OTHER; note = 2'-O-methyl modified nucleotide with 3'-phosphorothioate linkage
  modified_base 23: mod_base = OTHER; note = 2'-O-methyl modified nucleotide
atgtagtcgaagagcatctcagc

SEQ ID NO: 209 - RNA, 23 nt, synthetic construct
  source 1..23: mol_type = other RNA
  modified_base 1: mod_base = OTHER; note = 2'-O-methyl modified nucleotide with 3'-phosphorothioate linkage
  modified_base 2: mod_base = OTHER; note = 2'-fluoro modified nucleotide with 3'-phosphorothioate linkage
  modified_base 3: mod_base = OTHER; note = 2'-O-methyl modified nucleotide
  modified_base 4: mod_base = OTHER; note = 2'-O-methyl modified nucleotide
  modified_base 5: mod_base = OTHER; note = 2'-O-methyl modified nucleotide
  modified_base 6: mod_base = OTHER; note = 2'-fluoro modified nucleotide
  modified_base 7: mod_base = OTHER; note = 2'-O-methyl modified nucleotide
  modified_base 8: mod_base = OTHER; note = 2'-O-methyl modified nucleotide
  modified_base 9: mod_base = OTHER; note = 2'-O-methyl modified nucleotide
  modified_base 10: mod_base = OTHER; note = 2'-O-methyl modified nucleotide
  modified_base 11: mod_base = OTHER; note = 2'-O-methyl modified nucleotide
  modified_base 12: mod_base = OTHER; note = 2'-O-methyl modified nucleotide
  modified_base 13: mod_base = OTHER; note = 2'-O-methyl modified nucleotide
  modified_base 14: mod_base = OTHER; note = 2'-fluoro modified nucleotide
  modified_base 15: mod_base = OTHER; note = 2'-O-methyl modified nucleotide
  modified_base 16: mod_base = OTHER; note = 2'-fluoro modified nucleotide
  modified_base 17: mod_base = OTHER; note = 2'-O-methyl modified nucleotide
  modified_base 18: mod_base = OTHER; note = 2'-O-methyl modified nucleotide
  modified_base 19: mod_base = OTHER; note = 2'-O-methyl modified nucleotide
  modified_base 20: mod_base = OTHER; note = 2'-O-methyl modified nucleotide
  modified_base 21: mod_base = OTHER; note = 2'-O-methyl modified nucleotide with 3'-phosphorothioate linkage
  modified_base 22: mod_base = OTHER; note = 2'-O-methyl modified nucleotide with 3'-phosphorothioate linkage
  modified_base 23: mod_base = OTHER; note = 2'-O-methyl modified nucleotide
tcatctgatgcttgtccaggaag

SEQ ID NO: 210 - RNA, 23 nt, synthetic construct
  source 1..23: mol_type = other RNA
  modified_base 1: mod_base = OTHER; note = 2'-O-methyl modified nucleotide with 3'-phosphorothioate linkage
  modified_base 2: mod_base = OTHER; note = 2'-fluoro modified nucleotide with 3'-phosphorothioate linkage
  modified_base 3: mod_base = OTHER; note = 2'-O-methyl modified nucleotide
  modified_base 4: mod_base = OTHER; note = 2'-O-methyl modified nucleotide
  modified_base 5: mod_base = OTHER; note = 2'-O-methyl modified nucleotide
  modified_base 6: mod_base = OTHER; note = 2'-fluoro modified nucleotide
  modified_base 7: mod_base = OTHER; note = 2'-O-methyl modified nucleotide
  modified_base 8: mod_base = OTHER; note = 2'-O-methyl modified nucleotide
  modified_base 9: mod_base = OTHER; note = 2'-O-methyl modified nucleotide
  modified_base 10: mod_base = OTHER; note = 2'-O-methyl modified nucleotide
  modified_base 11: mod_base = OTHER; note = 2'-O-methyl modified nucleotide
  modified_base 12: mod_base = OTHER; note = 2'-O-methyl modified nucleotide
  modified_base 13: mod_base = OTHER; note = 2'-O-methyl modified nucleotide
  modified_base 14: mod_base = OTHER; note = 2'-fluoro modified nucleotide
  modified_base 15: mod_base = OTHER; note = 2'-O-methyl modified nucleotide
  modified_base 16: mod_base = OTHER; note = 2'-fluoro modified nucleotide
  modified_base 17: mod_base = OTHER; note = 2'-O-methyl modified nucleotide
  modified_base 18: mod_base = OTHER; note = 2'-O-methyl modified nucleotide
  modified_base 19: mod_base = OTHER; note = 2'-O-methyl modified nucleotide
  modified_base 20: mod_base = OTHER; note = 2'-O-methyl modified nucleotide
  modified_base 21: mod_base = OTHER; note = 2'-O-methyl modified nucleotide with 3'-phosphorothioate linkage
  modified_base 22: mod_base = OTHER; note = 2'-O-methyl modified nucleotide with 3'-phosphorothioate linkage
  modified_base 23: mod_base = OTHER; note = 2'-O-methyl modified nucleotide
gatgcccttatcgatgtcttcgt

SEQ ID NO: 211 - RNA, 23 nt, synthetic construct
  source 1..23: mol_type = other RNA
  modified_base 1: mod_base = OTHER; note = 2'-O-methyl modified nucleotide with 3'-phosphorothioate linkage
  modified_base 2: mod_base = OTHER; note = 2'-fluoro modified nucleotide with 3'-phosphorothioate linkage
  modified_base 3: mod_base = OTHER; note = 2'-O-methyl modified nucleotide
  modified_base 4: mod_base = OTHER; note = 2'-O-methyl modified nucleotide
  modified_base 5: mod_base = OTHER; note = 2'-O-methyl modified nucleotide
  modified_base 6: mod_base = OTHER; note = 2'-fluoro modified nucleotide
  modified_base 7: mod_base = OTHER; note = 2'-O-methyl modified nucleotide
  modified_base 8: mod_base = OTHER; note = 2'-O-methyl modified nucleotide
  modified_base 9: mod_base = OTHER; note = 2'-O-methyl modified nucleotide
  modified_base 10: mod_base = OTHER; note = 2'-O-methyl modified nucleotide
  modified_base 11: mod_base = OTHER; note = 2'-O-methyl modified nucleotide
  modified_base 12: mod_base = OTHER; note = 2'-O-methyl modified nucleotide
  modified_base 13: mod_base = OTHER; note = 2'-O-methyl modified nucleotide
  modified_base 14: mod_base = OTHER; note = 2'-fluoro modified nucleotide
  modified_base 15: mod_base = OTHER; note = 2'-O-methyl modified nucleotide
  modified_base 16: mod_base = OTHER; note = 2'-fluoro modified nucleotide
  modified_base 17: mod_base = OTHER; note = 2'-O-methyl modified nucleotide
  modified_base 18: mod_base = OTHER; note = 2'-O-methyl modified nucleotide
  modified_base 19: mod_base = OTHER; note = 2'-O-methyl modified nucleotide
  modified_base 20: mod_base = OTHER; note = 2'-O-methyl modified nucleotide
  modified_base 21: mod_base = OTHER; note = 2'-O-methyl modified nucleotide with 3'-phosphorothioate linkage
  modified_base 22: mod_base = OTHER; note = 2'-O-methyl modified nucleotide with 3'-phosphorothioate linkage
  modified_base 23: mod_base = OTHER; note = 2'-O-methyl modified nucleotide
aggatgcccttatcgatgtcttc

SEQ ID NO: 212 - RNA, 23 nt, synthetic construct
  source 1..23: mol_type = other RNA
  modified_base 1: mod_base = OTHER; note = 2'-O-methyl modified nucleotide with 3'-phosphorothioate linkage
  modified_base 2: mod_base = OTHER; note = 2'-fluoro modified nucleotide with 3'-phosphorothioate linkage
  modified_base 3: mod_base = OTHER; note = 2'-O-methyl modified nucleotide
  modified_base 4: mod_base = OTHER; note = 2'-O-methyl modified nucleotide
  modified_base 5: mod_base = OTHER; note = 2'-O-methyl modified nucleotide
  modified_base 6: mod_base = OTHER; note = 2'-fluoro modified nucleotide
  modified_base 7: mod_base = OTHER; note = 2'-O-methyl modified nucleotide
  modified_base 8: mod_base = OTHER; note = 2'-O-methyl modified nucleotide
  modified_base 9: mod_base = OTHER; note = 2'-O-methyl modified nucleotide
  modified_base 10: mod_base = OTHER; note = 2'-O-methyl modified nucleotide
  modified_base 11: mod_base = OTHER; note = 2'-O-methyl modified nucleotide
  modified_base 12: mod_base = OTHER; note = 2'-O-methyl modified nucleotide
  modified_base 13: mod_base = OTHER; note = 2'-O-methyl modified nucleotide
  modified_base 14: mod_base = OTHER; note = 2'-fluoro modified nucleotide
  modified_base 15: mod_base = OTHER; note = 2'-O-methyl modified nucleotide
  modified_base 16: mod_base = OTHER; note = 2'-fluoro modified nucleotide
  modified_base 17: mod_base = OTHER; note = 2'-O-methyl modified nucleotide
  modified_base 18: mod_base = OTHER; note = 2'-O-methyl modified nucleotide
  modified_base 19: mod_base = OTHER; note = 2'-O-methyl modified nucleotide
  modified_base 20: mod_base = OTHER; note = 2'-O-methyl modified nucleotide
  modified_base 21: mod_base = OTHER; note = 2'-O-methyl modified nucleotide with 3'-phosphorothioate linkage
  modified_base 22: mod_base = OTHER; note = 2'-O-methyl modified nucleotide with 3'-phosphorothioate linkage
  modified_base 23: mod_base = OTHER; note = 2'-O-methyl modified nucleotide
gttgagaaggatgcccttatcga

SEQ ID NO: 213 - RNA, 23 nt, synthetic construct
  source 1..23: mol_type = other RNA
  modified_base 1: mod_base = OTHER; note = 2'-O-methyl modified nucleotide with 3'-phosphorothioate linkage
  modified_base 2: mod_base = OTHER; note = 2'-fluoro modified nucleotide with 3'-phosphorothioate linkage
  modified_base 3: mod_base = OTHER; note = 2'-O-methyl modified nucleotide
  modified_base 4: mod_base = OTHER; note = 2'-O-methyl modified nucleotide
  modified_base 5: mod_base = OTHER; note = 2'-O-methyl modified nucleotide
  modified_base 6: mod_base = OTHER; note = 2'-fluoro modified nucleotide
  modified_base 7: mod_base = OTHER; note = 2'-O-methyl modified nucleotide
  modified_base 8: mod_base = OTHER; note = 2'-O-methyl modified nucleotide
  modified_base 9: mod_base = OTHER; note = 2'-O-methyl modified nucleotide
  modified_base 10: mod_base = OTHER; note = 2'-O-methyl modified nucleotide
  modified_base 11: mod_base = OTHER; note = 2'-O-methyl modified nucleotide
  modified_base 12: mod_base = OTHER; note = 2'-O-methyl modified nucleotide
  modified_base 13: mod_base = OTHER; note = 2'-O-methyl modified nucleotide
  modified_base 14: mod_base = OTHER; note = 2'-fluoro modified nucleotide
  modified_base 15: mod_base = OTHER; note = 2'-O-methyl modified nucleotide
  modified_base 16: mod_base = OTHER; note = 2'-fluoro modified nucleotide
  modified_base 17: mod_base = OTHER; note = 2'-O-methyl modified nucleotide
  modified_base 18: mod_base = OTHER; note = 2'-O-methyl modified nucleotide
  modified_base 19: mod_base = OTHER; note = 2'-O-methyl modified nucleotide
  modified_base 20: mod_base = OTHER; note = 2'-O-methyl modified nucleotide
  modified_base 21: mod_base = OTHER; note = 2'-O-methyl modified nucleotide with 3'-phosphorothioate linkage
  modified_base 22: mod_base = OTHER; note = 2'-O-methyl modified nucleotide with 3'-phosphorothioate linkage
  modified_base 23: mod_base = OTHER; note = 2'-O-methyl modified nucleotide
tccagttgagaaggatgccctta

SEQ ID NO: 214 - RNA, 23 nt, synthetic construct
  source 1..23: mol_type = other RNA
  modified_base 1: mod_base = OTHER; note = 2'-O-methyl modified nucleotide with 3'-phosphorothioate linkage
  modified_base 2: mod_base = OTHER; note = 2'-fluoro modified nucleotide with 3'-phosphorothioate linkage
  modified_base 3: mod_base = OTHER; note = 2'-O-methyl modified nucleotide
  modified_base 4: mod_base = OTHER; note = 2'-O-methyl modified nucleotide
  modified_base 5: mod_base = OTHER; note = 2'-O-methyl modified nucleotide
  modified_base 6: mod_base = OTHER; note = 2'-fluoro modified nucleotide
  modified_base 7: mod_base = OTHER; note = 2'-O-methyl modified nucleotide
  modified_base 8: mod_base = OTHER; note = 2'-O-methyl modified nucleotide
  modified_base 9: mod_base = OTHER; note = 2'-O-methyl modified nucleotide
  modified_base 10: mod_base = OTHER; note = 2'-O-methyl modified nucleotide
  modified_base 11: mod_base = OTHER; note = 2'-O-methyl modified nucleotide
  modified_base 12: mod_base = OTHER; note = 2'-O-methyl modified nucleotide
  modified_base 13: mod_base = OTHER; note = 2'-O-methyl modified nucleotide
  modified_base 14: mod_base = OTHER; note = 2'-fluoro modified nucleotide
  modified_base 15: mod_base = OTHER; note = 2'-O-methyl modified nucleotide
  modified_base 16: mod_base = OTHER; note = 2'-fluoro modified nucleotide
  modified_base 17: mod_base = OTHER; note = 2'-O-methyl modified nucleotide
  modified_base 18: mod_base = OTHER; note = 2'-O-methyl modified nucleotide
  modified_base 19: mod_base = OTHER; note = 2'-O-methyl modified nucleotide
  modified_base 20: mod_base = OTHER; note = 2'-O-methyl modified nucleotide
  modified_base 21: mod_base = OTHER; note = 2'-O-methyl modified nucleotide with 3'-phosphorothioate linkage
  modified_base 22: mod_base = OTHER; note = 2'-O-methyl modified nucleotide with 3'-phosphorothioate linkage
  modified_base 23: mod_base = OTHER; note = 2'-O-methyl modified nucleotide
tggtccagttgagaaggatgccc

SEQ ID NO: 215 - RNA, 23 nt, synthetic construct
  source 1..23: mol_type = other RNA
  modified_base 1: mod_base = OTHER; note = 2'-O-methyl modified nucleotide with 3'-phosphorothioate linkage
  modified_base 2: mod_base = OTHER; note = 2'-fluoro modified nucleotide with 3'-phosphorothioate linkage
  modified_base 3: mod_base = OTHER; note = 2'-O-methyl modified nucleotide
  modified_base 4: mod_base = OTHER; note = 2'-O-methyl modified nucleotide
  modified_base 5: mod_base = OTHER; note = 2'-O-methyl modified nucleotide
  modified_base 6: mod_base = OTHER; note = 2'-fluoro modified nucleotide
  modified_base 7: mod_base = OTHER; note = 2'-O-methyl modified nucleotide
  modified_base 8: mod_base = OTHER; note = 2'-O-methyl modified nucleotide
  modified_base 9: mod_base = OTHER; note = 2'-O-methyl modified nucleotide
  modified_base 10: mod_base = OTHER; note = 2'-O-methyl modified nucleotide
  modified_base 11: mod_base = OTHER; note = 2'-O-methyl modified nucleotide
  modified_base 12: mod_base = OTHER; note = 2'-O-methyl modified nucleotide
  modified_base 13: mod_base = OTHER; note = 2'-O-methyl modified nucleotide
  modified_base 14: mod_base = OTHER; note = 2'-fluoro modified nucleotide
  modified_base 15: mod_base = OTHER; note = 2'-O-methyl modified nucleotide
  modified_base 16: mod_base = OTHER; note = 2'-fluoro modified nucleotide
  modified_base 17: mod_base = OTHER; note = 2'-O-methyl modified nucleotide
  modified_base 18: mod_base = OTHER; note = 2'-O-methyl modified nucleotide
  modified_base 19: mod_base = OTHER; note = 2'-O-methyl modified nucleotide
  modified_base 20: mod_base = OTHER; note = 2'-O-methyl modified nucleotide
  modified_base 21: mod_base = OTHER; note = 2'-O-methyl modified nucleotide with 3'-phosphorothioate linkage
  modified_base 22: mod_base = OTHER; note = 2'-O-methyl modified nucleotide with 3'-phosphorothioate linkage
  modified_base 23: mod_base = OTHER; note = 2'-O-methyl modified nucleotide
cattgttcccttctgctcctgag

SEQ ID NO: 216 - RNA, 23 nt, synthetic construct
  source 1..23: mol_type = other RNA
  modified_base 1: mod_base = OTHER; note = 2'-O-methyl modified nucleotide with 3'-phosphorothioate linkage
  modified_base 2: mod_base = OTHER; note = 2'-fluoro modified nucleotide with 3'-phosphorothioate linkage
  modified_base 3: mod_base = OTHER; note = 2'-O-methyl modified nucleotide
  modified_base 4: mod_base = OTHER; note = 2'-O-methyl modified nucleotide
  modified_base 5: mod_base = OTHER; note = 2'-O-methyl modified nucleotide
  modified_base 6: mod_base = OTHER; note = 2'-fluoro modified nucleotide
  modified_base 7: mod_base = OTHER; note = 2'-O-methyl modified nucleotide
  modified_base 8: mod_base = OTHER; note = 2'-O-methyl modified nucleotide
  modified_base 9: mod_base = OTHER; note = 2'-O-methyl modified nucleotide
  modified_base 10: mod_base = OTHER; note = 2'-O-methyl modified nucleotide
  modified_base 11: mod_base = OTHER; note = 2'-O-methyl modified nucleotide
  modified_base 12: mod_base = OTHER; note = 2'-O-methyl modified nucleotide
  modified_base 13: mod_base = OTHER; note = 2'-O-methyl modified nucleotide
  modified_base 14: mod_base = OTHER; note = 2'-fluoro modified nucleotide
  modified_base 15: mod_base = OTHER; note = 2'-O-methyl modified nucleotide
  modified_base 16: mod_base = OTHER; note = 2'-fluoro modified nucleotide
  modified_base 17: mod_base = OTHER; note = 2'-O-methyl modified nucleotide
  modified_base 18: mod_base = OTHER; note = 2'-O-methyl modified nucleotide
  modified_base 19: mod_base = OTHER; note = 2'-O-methyl modified nucleotide
  modified_base 20: mod_base = OTHER; note = 2'-O-methyl modified nucleotide
  modified_base 21: mod_base = OTHER; note = 2'-O-methyl modified nucleotide with 3'-phosphorothioate linkage
  modified_base 22: mod_base = OTHER; note = 2'-O-methyl modified nucleotide with 3'-phosphorothioate linkage
  modified_base 23: mod_base = OTHER; note = 2'-O-methyl modified nucleotide
gacattgttcccttctgctcctg

SEQ ID NO: 217 - RNA, 23 nt, synthetic construct
  source 1..23: mol_type = other RNA
  modified_base 1: mod_base = OTHER; note = 2'-O-methyl modified nucleotide with 3'-phosphorothioate linkage
  modified_base 2: mod_base = OTHER; note = 2'-fluoro modified nucleotide with 3'-phosphorothioate linkage
  modified_base 3: mod_base = OTHER; note = 2'-O-methyl modified nucleotide
  modified_base 4: mod_base = OTHER; note = 2'-O-methyl modified nucleotide
  modified_base 5: mod_base = OTHER; note = 2'-O-methyl modified nucleotide
  modified_base 6: mod_base = OTHER; note = 2'-fluoro modified nucleotide
  modified_base 7: mod_base = OTHER; note = 2'-O-methyl modified nucleotide
  modified_base 8: mod_base = OTHER; note = 2'-O-methyl modified nucleotide
  modified_base 9: mod_base = OTHER; note = 2'-O-methyl modified nucleotide
  modified_base 10: mod_base = OTHER; note = 2'-O-methyl modified nucleotide
  modified_base 11: mod_base = OTHER; note = 2'-O-methyl modified nucleotide
  modified_base 12: mod_base = OTHER; note = 2'-O-methyl modified nucleotide
  modified_base 13: mod_base = OTHER; note = 2'-O-methyl modified nucleotide
  modified_base 14: mod_base = OTHER; note = 2'-fluoro modified nucleotide
  modified_base 15: mod_base = OTHER; note = 2'-O-methyl modified nucleotide
  modified_base 16: mod_base = OTHER; note = 2'-fluoro modified nucleotide
  modified_base 17: mod_base = OTHER; note = 2'-O-methyl modified nucleotide
  modified_base 18: mod_base = OTHER; note = 2'-O-methyl modified nucleotide
  modified_base 19: mod_base = OTHER; note = 2'-O-methyl modified nucleotide
  modified_base 20: mod_base = OTHER; note = 2'-O-methyl modified nucleotide
  modified_base 21: mod_base = OTHER; note = 2'-O-methyl modified nucleotide with 3'-phosphorothioate linkage
  modified_base 22: mod_base = OTHER; note = 2'-O-methyl modified nucleotide with 3'-phosphorothioate linkage
  modified_base 23: mod_base = OTHER; note = 2'-O-methyl modified nucleotide
cgacattgttcccttctgctcct

SEQ ID NO: 218 - RNA, 23 nt, synthetic construct
  source 1..23: mol_type = other RNA
  modified_base 1: mod_base = OTHER; note = 2'-O-methyl modified nucleotide with 3'-phosphorothioate linkage
  modified_base 2: mod_base = OTHER; note = 2'-fluoro modified nucleotide with 3'-phosphorothioate linkage
  modified_base 3: mod_base = OTHER; note = 2'-O-methyl modified nucleotide
  modified_base 4: mod_base = OTHER; note = 2'-O-methyl modified nucleotide
  modified_base 5: mod_base = OTHER; note = 2'-O-methyl modified nucleotide
  modified_base 6: mod_base = OTHER; note = 2'-fluoro modified nucleotide
  modified_base 7: mod_base = OTHER; note = 2'-O-methyl modified nucleotide
  modified_base 8: mod_base = OTHER; note = 2'-O-methyl modified nucleotide
  modified_base 9: mod_base = OTHER; note = 2'-O-methyl modified nucleotide
  modified_base 10: mod_base = OTHER; note = 2'-O-methyl modified nucleotide
  modified_base 11: mod_base = OTHER; note = 2'-O-methyl modified nucleotide
  modified_base 12: mod_base = OTHER; note = 2'-O-methyl modified nucleotide
  modified_base 13: mod_base = OTHER; note = 2'-O-methyl modified nucleotide
  modified_base 14: mod_base = OTHER; note = 2'-fluoro modified nucleotide
  modified_base 15: mod_base = OTHER; note = 2'-O-methyl modified nucleotide
  modified_base 16: mod_base = OTHER; note = 2'-fluoro modified nucleotide
  modified_base 17: mod_base = OTHER; note = 2'-O-methyl modified nucleotide
  modified_base 18: mod_base = OTHER; note = 2'-O-methyl modified nucleotide
  modified_base 19: mod_base = OTHER; note = 2'-O-methyl modified nucleotide
  modified_base 20: mod_base = OTHER; note = 2'-O-methyl modified nucleotide
  modified_base 21: mod_base = OTHER; note = 2'-O-methyl modified nucleotide with 3'-phosphorothioate linkage
  modified_base 22: mod_base = OTHER; note = 2'-O-methyl modified nucleotide with 3'-phosphorothioate linkage
  modified_base 23: mod_base = OTHER; note = 2'-O-methyl modified nucleotide
acgacattgttcccttctgctcc

SEQ ID NO: 219 - RNA, 23 nt, synthetic construct
  source 1..23: mol_type = other RNA
  modified_base 1: mod_base = OTHER; note = 2'-O-methyl modified nucleotide with 3'-phosphorothioate linkage
  modified_base 2: mod_base = OTHER; note = 2'-fluoro modified nucleotide with 3'-phosphorothioate linkage
  modified_base 3: mod_base = OTHER; note = 2'-O-methyl modified nucleotide
  modified_base 4: mod_base = OTHER; note = 2'-O-methyl modified nucleotide
  modified_base 5: mod_base = OTHER; note = 2'-O-methyl modified nucleotide
  modified_base 6: mod_base = OTHER; note = 2'-fluoro modified nucleotide
  modified_base 7: mod_base = OTHER; note = 2'-O-methyl modified nucleotide
  modified_base 8: mod_base = OTHER; note = 2'-O-methyl modified nucleotide
  modified_base 9: mod_base = OTHER; note = 2'-O-methyl modified nucleotide
  modified_base 10: mod_base = OTHER; note = 2'-O-methyl modified nucleotide
  modified_base 11: mod_base = OTHER; note = 2'-O-methyl modified nucleotide
  modified_base 12: mod_base = OTHER; note = 2'-O-methyl modified nucleotide
  modified_base 13: mod_base = OTHER; note = 2'-O-methyl modified nucleotide
  modified_base 14: mod_base = OTHER; note = 2'-fluoro modified nucleotide
  modified_base 15: mod_base = OTHER; note = 2'-O-methyl modified nucleotide
  modified_base 16: mod_base = OTHER; note = 2'-fluoro modified nucleotide
  modified_base 17: mod_base = OTHER; note = 2'-O-methyl modified nucleotide
  modified_base 18: mod_base = OTHER; note = 2'-O-methyl modified nucleotide
  modified_base 19: mod_base = OTHER; note = 2'-O-methyl modified nucleotide
  modified_base 20: mod_base = OTHER; note = 2'-O-methyl modified nucleotide
  modified_base 21: mod_base = OTHER; note = 2'-O-methyl modified nucleotide with 3'-phosphorothioate linkage
  modified_base 22: mod_base = OTHER; note = 2'-O-methyl modified nucleotide with 3'-phosphorothioate linkage
  modified_base 23: mod_base = OTHER; note = 2'-O-methyl modified nucleotide
ccacgacattgttcccttctgct

SEQ ID NO: 220 - RNA, 23 nt, synthetic construct
  source 1..23: mol_type = other RNA
  modified_base 1: mod_base = OTHER; note = 2'-O-methyl modified nucleotide with 3'-phosphorothioate linkage
  modified_base 2: mod_base = OTHER; note = 2'-fluoro modified nucleotide with 3'-phosphorothioate linkage
  modified_base 3: mod_base = OTHER; note = 2'-O-methyl modified nucleotide
  modified_base 4: mod_base = OTHER; note = 2'-O-methyl modified nucleotide
  modified_base 5: mod_base = OTHER; note = 2'-O-methyl modified nucleotide
  modified_base 6: mod_base = OTHER; note = 2'-fluoro modified nucleotide
  modified_base 7: mod_base = OTHER; note = 2'-O-methyl modified nucleotide
  modified_base 8: mod_base = OTHER; note = 2'-O-methyl modified nucleotide
  modified_base 9: mod_base = OTHER; note = 2'-O-methyl modified nucleotide
  modified_base 10: mod_base = OTHER; note = 2'-O-methyl modified nucleotide
  modified_base 11: mod_base = OTHER; note = 2'-O-methyl modified nucleotide
  modified_base 12: mod_base = OTHER; note = 2'-O-methyl modified nucleotide
  modified_base 13: mod_base = OTHER; note = 2'-O-methyl modified nucleotide
  modified_base 14: mod_base = OTHER; note = 2'-fluoro modified nucleotide
  modified_base 15: mod_base = OTHER; note = 2'-O-methyl modified nucleotide
  modified_base 16: mod_base = OTHER; note = 2'-fluoro modified nucleotide
  modified_base 17: mod_base = OTHER; note = 2'-O-methyl modified nucleotide
  modified_base 18: mod_base = OTHER; note = 2'-O-methyl modified nucleotide
  modified_base 19: mod_base = OTHER; note = 2'-O-methyl modified nucleotide
  modified_base 20: mod_base = OTHER; note = 2'-O-methyl modified nucleotide
  modified_base 21: mod_base = OTHER; note = 2'-O-methyl modified nucleotide with 3'-phosphorothioate linkage
  modified_base 22: mod_base = OTHER; note = 2'-O-methyl modified nucleotide with 3'-phosphorothioate linkage
  modified_base 23: mod_base = OTHER; note = 2'-O-methyl modified nucleotide
cccacgacattgttcccttctgc

SEQ ID NO: 221 - RNA, 23 nt, synthetic construct
  source 1..23: mol_type = other RNA
  modified_base 1: mod_base = OTHER; note = 2'-O-methyl modified nucleotide with 3'-phosphorothioate linkage
  modified_base 2: mod_base = OTHER; note = 2'-fluoro modified nucleotide with 3'-phosphorothioate linkage
  modified_base 3: mod_base = OTHER; note = 2'-O-methyl modified nucleotide
  modified_base 4: mod_base = OTHER; note = 2'-O-methyl modified nucleotide
  modified_base 5: mod_base = OTHER; note = 2'-O-methyl modified nucleotide
  modified_base 6: mod_base = OTHER; note = 2'-fluoro modified nucleotide
  modified_base 7: mod_base = OTHER; note = 2'-O-methyl modified nucleotide
  modified_base 8: mod_base = OTHER; note = 2'-O-methyl modified nucleotide
  modified_base 9: mod_base = OTHER; note = 2'-O-methyl modified nucleotide
  modified_base 10: mod_base = OTHER; note = 2'-O-methyl modified nucleotide
  modified_base 11: mod_base = OTHER; note = 2'-O-methyl modified nucleotide
  modified_base 12: mod_base = OTHER; note = 2'-O-methyl modified nucleotide
  modified_base 13: mod_base = OTHER; note = 2'-O-methyl modified nucleotide
  modified_base 14: mod_base = OTHER; note = 2'-fluoro modified nucleotide
  modified_base 15: mod_base = OTHER; note = 2'-O-methyl modified nucleotide
  modified_base 16: mod_base = OTHER; note = 2'-fluoro modified nucleotide
  modified_base 17: mod_base = OTHER; note = 2'-O-methyl modified nucleotide
  modified_base 18: mod_base = OTHER; note = 2'-O-methyl modified nucleotide
  modified_base 19: mod_base = OTHER; note = 2'-O-methyl modified nucleotide
  modified_base 20: mod_base = OTHER; note = 2'-O-methyl modified nucleotide
  modified_base 21: mod_base = OTHER; note = 2'-O-methyl modified nucleotide with 3'-phosphorothioate linkage
  modified_base 22: mod_base = OTHER; note = 2'-O-methyl modified nucleotide with 3'-phosphorothioate linkage
  modified_base 23: mod_base = OTHER; note = 2'-O-methyl modified nucleotide
accattgccaccacatccatttc

SEQ ID NO: 222 - RNA, 23 nt, synthetic construct
  source 1..23: mol_type = other RNA
  modified_base 1: mod_base = OTHER; note = 2'-O-methyl modified nucleotide with 3'-phosphorothioate linkage
  modified_base 2: mod_base = OTHER; note = 2'-fluoro modified nucleotide with 3'-phosphorothioate linkage
  modified_base 3: mod_base = OTHER; note = 2'-O-methyl modified nucleotide
  modified_base 4: mod_base = OTHER; note = 2'-O-methyl modified nucleotide
  modified_base 5: mod_base = OTHER; note = 2'-O-methyl modified nucleotide
  modified_base 6: mod_base = OTHER; note = 2'-fluoro modified nucleotide
  modified_base 7: mod_base = OTHER; note = 2'-O-methyl modified nucleotide
  modified_base 8: mod_base = OTHER; note = 2'-O-methyl modified nucleotide
  modified_base 9: mod_base = OTHER; note = 2'-O-methyl modified nucleotide
  modified_base 10: mod_base = OTHER; note = 2'-O-methyl modified nucleotide
  modified_base 11: mod_base = OTHER; note = 2'-O-methyl modified nucleotide
  modified_base 12: mod_base = OTHER; note = 2'-O-methyl modified nucleotide
  modified_base 13: mod_base = OTHER; note = 2'-O-methyl modified nucleotide
  modified_base 14: mod_base = OTHER; note = 2'-fluoro modified nucleotide
  modified_base 15: mod_base = OTHER; note = 2'-O-methyl modified nucleotide
  modified_base 16: mod_base = OTHER; note = 2'-fluoro modified nucleotide
  modified_base 17: mod_base = OTHER; note = 2'-O-methyl modified nucleotide
  modified_base 18: mod_base = OTHER; note = 2'-O-methyl modified nucleotide
  modified_base 19: mod_base = OTHER; note = 2'-O-methyl modified nucleotide
  modified_base 20: mod_base = OTHER; note = 2'-O-methyl modified nucleotide
  modified_base 21: mod_base = OTHER; note = 2'-O-methyl modified nucleotide with 3'-phosphorothioate linkage
  modified_base 22: mod_base = OTHER; note = 2'-O-methyl modified nucleotide with 3'-phosphorothioate linkage
  modified_base 23: mod_base = OTHER; note = 2'-O-methyl modified nucleotide
attcaccattgccaccacatcca

SEQ ID NO: 223 - RNA, 23 nt, synthetic construct
  source 1..23: mol_type = other RNA
  modified_base 1: mod_base = OTHER; note = 2'-O-methyl modified nucleotide with 3'-phosphorothioate linkage
  modified_base 2: mod_base = OTHER; note = 2'-fluoro modified nucleotide with 3'-phosphorothioate linkage
  modified_base 3: mod_base = OTHER; note = 2'-O-methyl modified nucleotide
  modified_base 4: mod_base = OTHER; note = 2'-O-methyl modified nucleotide
  modified_base 5: mod_base = OTHER; note = 2'-O-methyl modified nucleotide
  modified_base 6: mod_base = OTHER; note = 2'-fluoro modified nucleotide
  modified_base 7: mod_base = OTHER; note = 2'-O-methyl modified nucleotide
  modified_base 8: mod_base = OTHER; note = 2'-O-methyl modified nucleotide
  modified_base 9: mod_base = OTHER; note = 2'-O-methyl modified nucleotide
  modified_base 10: mod_base = OTHER; note = 2'-O-methyl modified nucleotide
  modified_base 11: mod_base = OTHER; note = 2'-O-methyl modified nucleotide
  modified_base 12: mod_base = OTHER; note = 2'-O-methyl modified nucleotide
  modified_base 13: mod_base = OTHER; note = 2'-O-methyl modified nucleotide
  modified_base 14: mod_base = OTHER; note = 2'-fluoro modified nucleotide
  modified_base 15: mod_base = OTHER; note = 2'-O-methyl modified nucleotide
  modified_base 16: mod_base = OTHER; note = 2'-fluoro modified nucleotide
  modified_base 17: mod_base = OTHER; note = 2'-O-methyl modified nucleotide
  modified_base 18: mod_base = OTHER; note = 2'-O-methyl modified nucleotide
  modified_base 19: mod_base = OTHER; note = 2'-O-methyl modified nucleotide
  modified_base 20: mod_base = OTHER; note = 2'-O-methyl modified nucleotide
  modified_base 21: mod_base = OTHER; note = 2'-O-methyl modified nucleotide with 3'-phosphorothioate linkage
  modified_base 22: mod_base = OTHER; note = 2'-O-methyl modified nucleotide with 3'-phosphorothioate linkage
  modified_base 23: mod_base = OTHER; note = 2'-O-methyl modified nucleotide
cattcaccattgccaccacatcc

SEQ ID NO: 224 - RNA, 23 nt, synthetic construct
  source 1..23: mol_type = other RNA
  modified_base 1: mod_base = OTHER; note = 2'-O-methyl modified nucleotide with 3'-phosphorothioate linkage
  modified_base 2: mod_base = OTHER; note = 2'-fluoro modified nucleotide with 3'-phosphorothioate linkage
  modified_base 3: mod_base = OTHER; note = 2'-O-methyl modified nucleotide
  modified_base 4: mod_base = OTHER; note = 2'-O-methyl modified nucleotide
  modified_base 5: mod_base = OTHER; note = 2'-O-methyl modified nucleotide
  modified_base 6: mod_base = OTHER; note = 2'-fluoro modified nucleotide
  modified_base 7: mod_base = OTHER; note = 2'-O-methyl modified nucleotide
  modified_base 8: mod_base = OTHER; note = 2'-O-methyl modified nucleotide
  modified_base 9: mod_base = OTHER; note = 2'-O-methyl modified nucleotide
  modified_base 10: mod_base = OTHER; note = 2'-O-methyl modified nucleotide
  modified_base 11: mod_base = OTHER; note = 2'-O-methyl modified nucleotide
  modified_base 12: mod_base = OTHER; note = 2'-O-methyl modified nucleotide
  modified_base 13: mod_base = OTHER; note = 2'-O-methyl modified nucleotide
  modified_base 14: mod_base = OTHER; note = 2'-fluoro modified nucleotide
  modified_base 15: mod_base = OTHER; note = 2'-O-methyl modified nucleotide
  modified_base 16: mod_base = OTHER; note = 2'-fluoro modified nucleotide
  modified_base 17: mod_base = OTHER; note = 2'-O-methyl modified nucleotide
  modified_base 18: mod_base = OTHER; note = 2'-O-methyl modified nucleotide
  modified_base 19: mod_base = OTHER; note = 2'-O-methyl modified nucleotide
  modified_base 20: mod_base = OTHER; note = 2'-O-methyl modified nucleotide
  modified_base 21: mod_base = OTHER; note = 2'-O-methyl modified nucleotide with 3'-phosphorothioate linkage
  modified_base 22: mod_base = OTHER; note = 2'-O-methyl modified nucleotide with 3'-phosphorothioate linkage
  modified_base 23: mod_base = OTHER; note = 2'-O-methyl modified nucleotide
tcattcaccattgccaccacatc

SEQ ID NO: 225 - RNA, 23 nt, synthetic construct
  source 1..23: mol_type = other RNA
  modified_base 1: mod_base = OTHER; note = 2'-O-methyl modified nucleotide with 3'-phosphorothioate linkage
  modified_base 2: mod_base = OTHER; note = 2'-fluoro modified nucleotide with 3'-phosphorothioate linkage
  modified_base 3: mod_base = OTHER; note = 2'-O-methyl modified nucleotide
  modified_base 4: mod_base = OTHER; note = 2'-O-methyl modified nucleotide
  modified_base 5: mod_base = OTHER; note = 2'-O-methyl modified nucleotide
  modified_base 6: mod_base = OTHER; note = 2'-fluoro modified nucleotide
  modified_base 7: mod_base = OTHER; note = 2'-O-methyl modified nucleotide
  modified_base 8: mod_base = OTHER; note = 2'-O-methyl modified nucleotide
  modified_base 9: mod_base = OTHER; note = 2'-O-methyl modified nucleotide
  modified_base 10: mod_base = OTHER; note = 2'-O-methyl modified nucleotide
  modified_base 11: mod_base = OTHER; note = 2'-O-methyl modified nucleotide
  modified_base 12: mod_base = OTHER; note = 2'-O-methyl modified nucleotide
  modified_base 13: mod_base = OTHER; note = 2'-O-methyl modified nucleotide
  modified_base 14: mod_base = OTHER; note = 2'-fluoro modified nucleotide
  modified_base 15: mod_base = OTHER; note = 2'-O-methyl modified nucleotide
  modified_base 16: mod_base = OTHER; note = 2'-fluoro modified nucleotide
  modified_base 17: mod_base = OTHER; note = 2'-O-methyl modified nucleotide
  modified_base 18: mod_base = OTHER; note = 2'-O-methyl modified nucleotide
  modified_base 19: mod_base = OTHER; note = 2'-O-methyl modified nucleotide
  modified_base 20: mod_base = OTHER; note = 2'-O-methyl modified nucleotide
  modified_base 21: mod_base = OTHER; note = 2'-O-methyl modified nucleotide with 3'-phosphorothioate linkage
  modified_base 22: mod_base = OTHER; note = 2'-O-methyl modified nucleotide with 3'-phosphorothioate linkage
  modified_base 23: mod_base = OTHER; note = 2'-O-methyl modified nucleotide
gtgtcattcaccattgccaccac

SEQ ID NO: 226 - RNA, 23 nt, synthetic construct
  source 1..23: mol_type = other RNA
  modified_base 1: mod_base = OTHER; note = 2'-O-methyl modified nucleotide with 3'-phosphorothioate linkage
  modified_base 2: mod_base = OTHER; note = 2'-fluoro modified nucleotide with 3'-phosphorothioate linkage
  modified_base 3: mod_base = OTHER; note = 2'-O-methyl modified nucleotide
  modified_base 4: mod_base = OTHER; note = 2'-O-methyl modified nucleotide
  modified_base 5: mod_base = OTHER; note = 2'-O-methyl modified nucleotide
  modified_base 6: mod_base = OTHER; note = 2'-fluoro modified nucleotide
  modified_base 7: mod_base = OTHER; note = 2'-O-methyl modified nucleotide
  modified_base 8: mod_base = OTHER; note = 2'-O-methyl modified nucleotide
  modified_base 9: mod_base = OTHER; note = 2'-O-methyl modified nucleotide
  modified_base 10: mod_base = OTHER; note = 2'-O-methyl modified nucleotide
  modified_base 11: mod_base = OTHER; note = 2'-O-methyl modified nucleotide
  modified_base 12: mod_base = OTHER; note = 2'-O-methyl modified nucleotide
  modified_base 13: mod_base = OTHER; note = 2'-O-methyl modified nucleotide
  modified_base 14: mod_base = OTHER; note = 2'-fluoro modified nucleotide
  modified_base 15: mod_base = OTHER; note = 2'-O-methyl modified nucleotide
  modified_base 16: mod_base = OTHER; note = 2'-fluoro modified nucleotide
  modified_base 17: mod_base = OTHER; note = 2'-O-methyl modified nucleotide
  modified_base 18: mod_base = OTHER; note = 2'-O-methyl modified nucleotide
  modified_base 19: mod_base = OTHER; note = 2'-O-methyl modified nucleotide
  modified_base 20: mod_base = OTHER; note = 2'-O-methyl modified nucleotide
  modified_base 21: mod_base = OTHER; note = 2'-O-methyl modified nucleotide with 3'-phosphorothioate linkage
  modified_base 22: mod_base = OTHER; note = 2'-O-methyl modified nucleotide with 3'-phosphorothioate linkage
  modified_base 23: mod_base = OTHER; note = 2'-O-methyl modified nucleotide
accgtgtcattcaccattgccac

SEQ ID NO: 227 - RNA, 23 nt, synthetic construct
  source 1..23: mol_type = other RNA
  modified_base 1: mod_base = OTHER; note = 2'-O-methyl modified nucleotide with 3'-phosphorothioate linkage
  modified_base 2: mod_base = OTHER; note = 2'-fluoro modified nucleotide with 3'-phosphorothioate linkage
  modified_base 3: mod_base = OTHER; note = 2'-O-methyl modified nucleotide
  modified_base 4: mod_base = OTHER; note = 2'-O-methyl modified nucleotide
  modified_base 5: mod_base = OTHER; note = 2'-O-methyl modified nucleotide
  modified_base 6: mod_base = OTHER; note = 2'-fluoro modified nucleotide
  modified_base 7: mod_base = OTHER; note = 2'-O-methyl modified nucleotide
  modified_base 8: mod_base = OTHER; note = 2'-O-methyl modified nucleotide
  modified_base 9: mod_base = OTHER; note = 2'-O-methyl modified nucleotide
  modified_base 10: mod_base = OTHER; note = 2'-O-methyl modified nucleotide
  modified_base 11: mod_base = OTHER; note = 2'-O-methyl modified nucleotide
  modified_base 12: mod_base = OTHER; note = 2'-O-methyl modified nucleotide
  modified_base 13: mod_base = OTHER; note = 2'-O-methyl modified nucleotide
  modified_base 14: mod_base = OTHER; note = 2'-fluoro modified nucleotide
  modified_base 15: mod_base = OTHER; note = 2'-O-methyl modified nucleotide
  modified_base 16: mod_base = OTHER; note = 2'-fluoro modified nucleotide
  modified_base 17: mod_base = OTHER; note = 2'-O-methyl modified nucleotide
  modified_base 18: mod_base = OTHER; note = 2'-O-methyl modified nucleotide
  modified_base 19: mod_base = OTHER; note = 2'-O-methyl modified nucleotide
  modified_base 20: mod_base = OTHER; note = 2'-O-methyl modified nucleotide
  modified_base 21: mod_base = OTHER; note = 2'-O-methyl modified nucleotide with 3'-phosphorothioate linkage
  modified_base 22: mod_base = OTHER; note = 2'-O-methyl modified nucleotide with 3'-phosphorothioate linkage
  modified_base 23: mod_base = OTHER; note = 2'-O-methyl modified nucleotide
caccgtgtcattcaccattgcca

SEQ ID NO: 228 - RNA, 23 nt, synthetic construct
  source 1..23: mol_type = other RNA
  modified_base 1: mod_base = OTHER; note = 2'-O-methyl modified nucleotide with 3'-phosphorothioate linkage
  modified_base 2: mod_base = OTHER; note = 2'-fluoro modified nucleotide with 3'-phosphorothioate linkage
  modified_base 3: mod_base = OTHER; note = 2'-O-methyl modified nucleotide
  modified_base 4: mod_base = OTHER; note = 2'-O-methyl modified nucleotide
  modified_base 5: mod_base = OTHER; note = 2'-O-methyl modified nucleotide
  modified_base 6: mod_base = OTHER; note = 2'-fluoro modified nucleotide
  modified_base 7: mod_base = OTHER; note = 2'-O-methyl modified nucleotide
  modified_base 8: mod_base = OTHER; note = 2'-O-methyl modified nucleotide
  modified_base 9: mod_base = OTHER; note = 2'-O-methyl modified nucleotide
  modified_base 10: mod_base = OTHER; note = 2'-O-methyl modified nucleotide
  modified_base 11: mod_base = OTHER; note = 2'-O-methyl modified nucleotide
  modified_base 12: mod_base = OTHER; note = 2'-O-methyl modified nucleotide
  modified_base 13: mod_base = OTHER; note = 2'-O-methyl modified nucleotide
  modified_base 14: mod_base = OTHER; note = 2'-fluoro modified nucleotide
  modified_base 15: mod_base = OTHER; note = 2'-O-methyl modified nucleotide
  modified_base 16: mod_base = OTHER; note = 2'-fluoro modified nucleotide
  modified_base 17: mod_base = OTHER; note = 2'-O-methyl modified nucleotide
  modified_base 18: mod_base = OTHER; note = 2'-O-methyl modified nucleotide
  modified_base 19: mod_base = OTHER; note = 2'-O-methyl modified nucleotide
  modified_base 20: mod_base = OTHER; note = 2'-O-methyl modified nucleotide
  modified_base 21: mod_base = OTHER; note = 2'-O-methyl modified nucleotide with 3'-phosphorothioate linkage
  modified_base 22: mod_base = OTHER; note = 2'-O-methyl modified nucleotide with 3'-phosphorothioate linkage
  modified_base 23: mod_base = OTHER; note = 2'-O-methyl modified nucleotide
ggccaccgtgtcattcaccattg

SEQ ID NO: 229 - RNA, 23 nt, synthetic construct
  source 1..23: mol_type = other RNA
  modified_base 1: mod_base = OTHER; note = 2'-O-methyl modified nucleotide with 3'-phosphorothioate linkage
  modified_base 2: mod_base = OTHER; note = 2'-fluoro modified nucleotide with 3'-phosphorothioate linkage
  modified_base 3: mod_base = OTHER; note = 2'-O-methyl modified nucleotide
  modified_base 4: mod_base = OTHER; note = 2'-O-methyl modified nucleotide
  modified_base 5: mod_base = OTHER; note = 2'-O-methyl modified nucleotide
  modified_base 6: mod_base = OTHER; note = 2'-fluoro modified nucleotide
  modified_base 7: mod_base = OTHER; note = 2'-O-methyl modified nucleotide
  modified_base 8: mod_base = OTHER; note = 2'-O-methyl modified nucleotide
  modified_base 9: mod_base = OTHER; note = 2'-O-methyl modified nucleotide
  modified_base 10: mod_base = OTHER; note = 2'-O-methyl modified nucleotide
  modified_base 11: mod_base = OTHER; note = 2'-O-methyl modified nucleotide
  modified_base 12: mod_base = OTHER; note = 2'-O-methyl modified nucleotide
  modified_base 13: mod_base = OTHER; note = 2'-O-methyl modified nucleotide
  modified_base 14: mod_base = OTHER; note = 2'-fluoro modified nucleotide
  modified_base 15: mod_base = OTHER; note = 2'-O-methyl modified nucleotide
  modified_base 16: mod_base = OTHER; note = 2'-fluoro modified nucleotide
  modified_base 17: mod_base = OTHER; note = 2'-O-methyl modified nucleotide
  modified_base 18: mod_base = OTHER; note = 2'-O-methyl modified nucleotide
  modified_base 19: mod_base = OTHER; note = 2'-O-methyl modified nucleotide
  modified_base 20: mod_base = OTHER; note = 2'-O-methyl modified nucleotide
  modified_base 21: mod_base = OTHER; note = 2'-O-methyl modified nucleotide with 3'-phosphorothioate linkage
  modified_base 22: mod_base = OTHER; note = 2'-O-methyl modified nucleotide with 3'-phosphorothioate linkage
  modified_base 23: mod_base = OTHER; note = 2'-O-methyl modified nucleotide
tggccaccgtgtcattcaccatt

SEQ ID NO: 230 - RNA, 23 nt, synthetic construct
  source 1..23: mol_type = other RNA
  modified_base 1: mod_base = OTHER; note = 2'-O-methyl modified nucleotide with 3'-phosphorothioate linkage
  modified_base 2: mod_base = OTHER; note = 2'-fluoro modified nucleotide with 3'-phosphorothioate linkage
  modified_base 3: mod_base = OTHER; note = 2'-O-methyl modified nucleotide
  modified_base 4: mod_base = OTHER; note = 2'-O-methyl modified nucleotide
  modified_base 5: mod_base = OTHER; note = 2'-O-methyl modified nucleotide
  modified_base 6: mod_base = OTHER; note = 2'-fluoro modified nucleotide
  modified_base 7: mod_base = OTHER; note = 2'-O-methyl modified nucleotide
  modified_base 8: mod_base = OTHER; note = 2'-O-methyl modified nucleotide
  modified_base 9: mod_base = OTHER; note = 2'-O-methyl modified nucleotide
  modified_base 10: mod_base = OTHER; note = 2'-O-methyl modified nucleotide
  modified_base 11: mod_base = OTHER; note = 2'-O-methyl modified nucleotide
  modified_base 12: mod_base = OTHER; note = 2'-O-methyl modified nucleotide
  modified_base 13: mod_base = OTHER; note = 2'-O-methyl modified nucleotide
  modified_base 14: mod_base = OTHER; note = 2'-fluoro modified nucleotide
  modified_base 15: mod_base = OTHER; note = 2'-O-methyl modified nucleotide
  modified_base 16: mod_base = OTHER; note = 2'-fluoro modified nucleotide
  modified_base 17: mod_base = OTHER; note = 2'-O-methyl modified nucleotide
  modified_base 18: mod_base = OTHER; note = 2'-O-methyl modified nucleotide
  modified_base 19: mod_base = OTHER; note = 2'-O-methyl modified nucleotide
  modified_base 20: mod_base = OTHER; note = 2'-O-methyl modified nucleotide
  modified_base 21: mod_base = OTHER; note = 2'-O-methyl modified nucleotide with 3'-phosphorothioate linkage
  modified_base 22: mod_base = OTHER; note = 2'-O-methyl modified nucleotide with 3'-phosphorothioate linkage
  modified_base 23: mod_base = OTHER; note = 2'-O-methyl modified nucleotide
agtagcaggagatcatcgtggcc

SEQ ID NO: 231 - RNA, 23 nt, synthetic construct
  source 1..23: mol_type = other RNA
  modified_base 1: mod_base = OTHER; note = 2'-O-methyl modified nucleotide with 3'-phosphorothioate linkage
  modified_base 2: mod_base = OTHER; note = 2'-fluoro modified nucleotide with 3'-phosphorothioate linkage
  modified_base 3: mod_base = OTHER; note = 2'-O-methyl modified nucleotide
  modified_base 4: mod_base = OTHER; note = 2'-O-methyl modified nucleotide
  modified_base 5: mod_base = OTHER; note = 2'-O-methyl modified nucleotide
  modified_base 6: mod_base = OTHER; note = 2'-fluoro modified nucleotide
  modified_base 7: mod_base = OTHER; note = 2'-O-methyl modified nucleotide
  modified_base 8: mod_base = OTHER; note = 2'-O-methyl modified nucleotide
  modified_base 9: mod_base = OTHER; note = 2'-O-methyl modified nucleotide
  modified_base 10: mod_base = OTHER; note = 2'-O-methyl modified nucleotide
  modified_base 11: mod_base = OTHER; note = 2'-O-methyl modified nucleotide
  modified_base 12: mod_base = OTHER; note = 2'-O-methyl modified nucleotide
  modified_base 13: mod_base = OTHER; note = 2'-O-methyl modified nucleotide
  modified_base 14: mod_base = OTHER; note = 2'-fluoro modified nucleotide
  modified_base 15: mod_base = OTHER; note = 2'-O-methyl modified nucleotide
  modified_base 16: mod_base = OTHER; note = 2'-fluoro modified nucleotide
  modified_base 17: mod_base = OTHER; note = 2'-O-methyl modified nucleotide
  modified_base 18: mod_base = OTHER; note = 2'-O-methyl modified nucleotide
  modified_base 19: mod_base = OTHER; note = 2'-O-methyl modified nucleotide
  modified_base 20: mod_base = OTHER; note = 2'-O-methyl modified nucleotide
  modified_base 21: mod_base = OTHER; note = 2'-O-methyl modified nucleotide with 3'-phosphorothioate linkage
  modified_base 22: mod_base = OTHER; note = 2'-O-methyl modified nucleotide with 3'-phosphorothioate linkage
  modified_base 23: mod_base = OTHER; note = 2'-O-methyl modified nucleotide
tagtagcaggagatcatcgtggc

SEQ ID NO: 232 - RNA, 23 nt, synthetic construct
  source 1..23: mol_type = other RNA
  modified_base 1: mod_base = OTHER; note = 2'-O-methyl modified nucleotide with 3'-phosphorothioate linkage
  modified_base 2: mod_base = OTHER; note = 2'-fluoro modified nucleotide with 3'-phosphorothioate linkage
  modified_base 3: mod_base = OTHER; note = 2'-O-methyl modified nucleotide
  modified_base 4: mod_base = OTHER; note = 2'-O-methyl modified nucleotide
  modified_base 5: mod_base = OTHER; note = 2'-O-methyl modified nucleotide
  modified_base 6: mod_base = OTHER; note = 2'-fluoro modified nucleotide
  modified_base 7: mod_base = OTHER; note = 2'-O-methyl modified nucleotide
  modified_base 8: mod_base = OTHER; note = 2'-O-methyl modified nucleotide
  modified_base 9: mod_base = OTHER; note = 2'-O-methyl modified nucleotide
  modified_base 10: mod_base = OTHER; note = 2'-O-methyl modified nucleotide
  modified_base 11: mod_base = OTHER; note = 2'-O-methyl modified nucleotide
  modified_base 12: mod_base = OTHER; note = 2'-O-methyl modified nucleotide
  modified_base 13: mod_base = OTHER; note = 2'-O-methyl modified nucleotide
  modified_base 14: mod_base = OTHER; note = 2'-fluoro modified nucleotide
  modified_base 15: mod_base = OTHER; note = 2'-O-methyl modified nucleotide
  modified_base 16: mod_base = OTHER; note = 2'-fluoro modified nucleotide
  modified_base 17: mod_base = OTHER; note = 2'-O-methyl modified nucleotide
  modified_base 18: mod_base = OTHER; note = 2'-O-methyl modified nucleotide
  modified_base 19: mod_base = OTHER; note = 2'-O-methyl modified nucleotide
  modified_base 20: mod_base = OTHER; note = 2'-O-methyl modified nucleotide
  modified_base 21: mod_base = OTHER; note = 2'-O-methyl modified nucleotide with 3'-phosphorothioate linkage
  modified_base 22: mod_base = OTHER; note = 2'-O-methyl modified nucleotide with 3'-phosphorothioate linkage
  modified_base 23: mod_base = OTHER; note = 2'-O-methyl modified nucleotide
gtagtagcaggagatcatcgtgg

SEQ ID NO: 233 - RNA, 23 nt, synthetic construct
  source 1..23: mol_type = other RNA
  modified_base 1: mod_base = OTHER; note = 2'-O-methyl modified nucleotide with 3'-phosphorothioate linkage
  modified_base 2: mod_base = OTHER; note = 2'-fluoro modified nucleotide with 3'-phosphorothioate linkage
  modified_base 3: mod_base = OTHER; note = 2'-O-methyl modified nucleotide
  modified_base 4: mod_base = OTHER; note = 2'-O-methyl modified nucleotide
  modified_base 5: mod_base = OTHER; note = 2'-O-methyl modified nucleotide
  modified_base 6: mod_base = OTHER; note = 2'-fluoro modified nucleotide
  modified_base 7: mod_base = OTHER; note = 2'-O-methyl modified nucleotide
  modified_base 8: mod_base = OTHER; note = 2'-O-methyl modified nucleotide
  modified_base 9: mod_base = OTHER; note = 2'-O-methyl modified nucleotide
  modified_base 10: mod_base = OTHER; note = 2'-O-methyl modified nucleotide
  modified_base 11: mod_base = OTHER; note = 2'-O-methyl modified nucleotide
  modified_base 12: mod_base = OTHER; note = 2'-O-methyl modified nucleotide
  modified_base 13: mod_base = OTHER; note = 2'-O-methyl modified nucleotide
  modified_base 14: mod_base = OTHER; note = 2'-fluoro modified nucleotide
  modified_base 15: mod_base = OTHER; note = 2'-O-methyl modified nucleotide
  modified_base 16: mod_base = OTHER; note = 2'-fluoro modified nucleotide
  modified_base 17: mod_base = OTHER; note = 2'-O-methyl modified nucleotide
  modified_base 18: mod_base = OTHER; note = 2'-O-methyl modified nucleotide
  modified_base 19: mod_base = OTHER; note = 2'-O-methyl modified nucleotide
  modified_base 20: mod_base = OTHER; note = 2'-O-methyl modified nucleotide
  modified_base 21: mod_base = OTHER; note = 2'-O-methyl modified nucleotide with 3'-phosphorothioate linkage
  modified_base 22: mod_base = OTHER; note = 2'-O-methyl modified nucleotide with 3'-phosphorothioate linkage
  modified_base 23: mod_base = OTHER; note = 2'-O-methyl modified nucleotide
cgtagtagcaggagatcatcgtg

SEQ ID NO: 234 - RNA, 23 nt, synthetic construct
  source 1..23: mol_type = other RNA
  modified_base 1: mod_base = OTHER; note = 2'-O-methyl modified nucleotide with 3'-phosphorothioate linkage
  modified_base 2: mod_base = OTHER; note = 2'-fluoro modified nucleotide with 3'-phosphorothioate linkage
  modified_base 3: mod_base = OTHER; note = 2'-O-methyl modified nucleotide
  modified_base 4: mod_base = OTHER; note = 2'-O-methyl modified nucleotide
  modified_base 5: mod_base = OTHER; note = 2'-O-methyl modified nucleotide
  modified_base 6: mod_base = OTHER; note = 2'-fluoro modified nucleotide
  modified_base 7: mod_base = OTHER; note = 2'-O-methyl modified nucleotide
  modified_base 8: mod_base = OTHER; note = 2'-O-methyl modified nucleotide
  modified_base 9: mod_base = OTHER; note = 2'-O-methyl modified nucleotide
  modified_base 10: mod_base = OTHER; note = 2'-O-methyl modified nucleotide
  modified_base 11: mod_base = OTHER; note = 2'-O-methyl modified nucleotide
  modified_base 12: mod_base = OTHER; note = 2'-O-methyl modified nucleotide
  modified_base 13: mod_base = OTHER; note = 2'-O-methyl modified nucleotide
  modified_base 14: mod_base = OTHER; note = 2'-fluoro modified nucleotide
  modified_base 15: mod_base = OTHER; note = 2'-O-methyl modified nucleotide
  modified_base 16: mod_base = OTHER; note = 2'-fluoro modified nucleotide
  modified_base 17: mod_base = OTHER; note = 2'-O-methyl modified nucleotide
  modified_base 18: mod_base = OTHER; note = 2'-O-methyl modified nucleotide
  modified_base 19: mod_base = OTHER; note = 2'-O-methyl modified nucleotide
  modified_base 20: mod_base = OTHER; note = 2'-O-methyl modified nucleotide
  modified_base 21: mod_base = OTHER; note = 2'-O-methyl modified nucleotide with 3'-phosphorothioate linkage
  modified_base 22: mod_base = OTHER; note = 2'-O-methyl modified nucleotide with 3'-phosphorothioate linkage
  modified_base 23: mod_base = OTHER; note = 2'-O-methyl modified nucleotide
tcgtagtagcaggagatcatcgt

SEQ ID NO: 235 - RNA, 23 nt, synthetic construct
  source 1..23: mol_type = other RNA
  modified_base 1: mod_base = OTHER; note = 2'-O-methyl modified nucleotide with 3'-phosphorothioate linkage
  modified_base 2: mod_base = OTHER; note = 2'-fluoro modified nucleotide with 3'-phosphorothioate linkage
  modified_base 3: mod_base = OTHER; note = 2'-O-methyl modified nucleotide
  modified_base 4: mod_base = OTHER; note = 2'-O-methyl modified nucleotide
  modified_base 5: mod_base = OTHER; note = 2'-O-methyl modified nucleotide
  modified_base 6: mod_base = OTHER; note = 2'-fluoro modified nucleotide
  modified_base 7: mod_base = OTHER; note = 2'-O-methyl modified nucleotide
  modified_base 8: mod_base = OTHER; note = 2'-O-methyl modified nucleotide
  modified_base 9: mod_base = OTHER; note = 2'-O-methyl modified nucleotide
  modified_base 10: mod_base = OTHER; note = 2'-O-methyl modified nucleotide
  modified_base 11: mod_base = OTHER; note = 2'-O-methyl modified nucleotide
  modified_base 12: mod_base = OTHER; note = 2'-O-methyl modified nucleotide
  modified_base 13: mod_base = OTHER; note = 2'-O-methyl modified nucleotide
  modified_base 14: mod_base = OTHER; note = 2'-fluoro modified nucleotide
  modified_base 15: mod_base = OTHER; note = 2'-O-methyl modified nucleotide
  modified_base 16: mod_base = OTHER; note = 2'-fluoro modified nucleotide
  modified_base 17: mod_base = OTHER; note = 2'-O-methyl modified nucleotide
  modified_base 18: mod_base = OTHER; note = 2'-O-methyl modified nucleotide
  modified_base 19: mod_base = OTHER; note = 2'-O-methyl modified nucleotide
  modified_base 20: mod_base = OTHER; note = 2'-O-methyl modified nucleotide
  modified_base 21: mod_base = OTHER; note = 2'-O-methyl modified nucleotide with 3'-phosphorothioate linkage
  modified_base 22: mod_base = OTHER; note = 2'-O-methyl modified nucleotide with 3'-phosphorothioate linkage
  modified_base 23: mod_base = OTHER; note = 2'-O-methyl modified nucleotide
cttcgtagtagcaggagatcatc

SEQ ID NO: 236 - RNA, 23 nt, synthetic construct
  source 1..23: mol_type = other RNA
  modified_base 1: mod_base = OTHER; note = 2'-O-methyl modified nucleotide with 3'-phosphorothioate linkage
  modified_base 2: mod_base = OTHER; note = 2'-fluoro modified nucleotide with 3'-phosphorothioate linkage
  modified_base 3: mod_base = OTHER; note = 2'-O-methyl modified nucleotide
  modified_base 4: mod_base = OTHER; note = 2'-O-methyl modified nucleotide
  modified_base 5: mod_base = OTHER; note = 2'-O-methyl modified nucleotide
  modified_base 6: mod_base = OTHER; note = 2'-fluoro modified nucleotide
  modified_base 7: mod_base = OTHER; note = 2'-O-methyl modified nucleotide
  modified_base 8: mod_base = OTHER; note = 2'-O-methyl modified nucleotide
  modified_base 9: mod_base = OTHER; note = 2'-O-methyl modified nucleotide
  modified_base 10: mod_base = OTHER; note = 2'-O-methyl modified nucleotide
  modified_base 11: mod_base = OTHER; note = 2'-O-methyl modified nucleotide
  modified_base 12: mod_base = OTHER; note = 2'-O-methyl modified nucleotide
  modified_base 13: mod_base = OTHER; note = 2'-O-methyl modified nucleotide
  modified_base 14: mod_base = OTHER; note = 2'-fluoro modified nucleotide
  modified_base 15: mod_base = OTHER; note = 2'-O-methyl modified nucleotide
  modified_base 16: mod_base = OTHER; note = 2'-fluoro modified nucleotide
  modified_base 17: mod_base = OTHER; note = 2'-O-methyl modified nucleotide
  modified_base 18: mod_base = OTHER; note = 2'-O-methyl modified nucleotide
  modified_base 19: mod_base = OTHER; note = 2'-O-methyl modified nucleotide
  modified_base 20: mod_base = OTHER; note = 2'-O-methyl modified nucleotide
  modified_base 21: mod_base = OTHER; note = 2'-O-methyl modified nucleotide with 3'-phosphorothioate linkage
  modified_base 22: mod_base = OTHER; note = 2'-O-methyl modified nucleotide with 3'-phosphorothioate linkage
  modified_base 23: mod_base = OTHER; note = 2'-O-methyl modified nucleotide
tcttcgtagtagcaggagatcat

SEQ ID NO: 237 - RNA, 23 nt, synthetic construct
  source 1..23: mol_type = other RNA
  modified_base 1: mod_base = OTHER; note = 2'-O-methyl modified nucleotide with 3'-phosphorothioate linkage
  modified_base 2: mod_base = OTHER; note = 2'-fluoro modified nucleotide with 3'-phosphorothioate linkage
  modified_base 3: mod_base = OTHER; note = 2'-O-methyl modified nucleotide
  modified_base 4: mod_base = OTHER; note = 2'-O-methyl modified nucleotide
  modified_base 5: mod_base = OTHER; note = 2'-O-methyl modified nucleotide
  modified_base 6: mod_base = OTHER; note = 2'-fluoro modified nucleotide
  modified_base 7: mod_base = OTHER; note = 2'-O-methyl modified nucleotide
  modified_base 8: mod_base = OTHER; note = 2'-O-methyl modified nucleotide
  modified_base 9: mod_base = OTHER; note = 2'-O-methyl modified nucleotide
  modified_base 10: mod_base = OTHER; note = 2'-O-methyl modified nucleotide
  modified_base 11: mod_base = OTHER; note = 2'-O-methyl modified nucleotide
  modified_base 12: mod_base = OTHER; note = 2'-O-methyl modified nucleotide
  modified_base 13: mod_base = OTHER; note = 2'-O-methyl modified nucleotide
  modified_base 14: mod_base = OTHER; note = 2'-fluoro modified nucleotide
  modified_base 15: mod_base = OTHER; note = 2'-O-methyl modified nucleotide
  modified_base 16: mod_base = OTHER; note = 2'-fluoro modified nucleotide
  modified_base 17: mod_base = OTHER; note = 2'-O-methyl modified nucleotide
  modified_base 18: mod_base = OTHER; note = 2'-O-methyl modified nucleotide
  modified_base 19: mod_base = OTHER; note = 2'-O-methyl modified nucleotide
  modified_base 20: mod_base = OTHER; note = 2'-O-methyl modified nucleotide
  modified_base 21: mod_base = OTHER; note = 2'-O-methyl modified nucleotide with 3'-phosphorothioate linkage
  modified_base 22: mod_base = OTHER; note = 2'-O-methyl modified nucleotide with 3'-phosphorothioate linkage
  modified_base 23: mod_base = OTHER; note = 2'-O-methyl modified nucleotide
cactgatggtcttcgtagtagca

SEQ ID NO: 238 - RNA, 23 nt, synthetic construct
  source 1..23: mol_type = other RNA
  modified_base 1: mod_base = OTHER; note = 2'-O-methyl modified nucleotide with 3'-phosphorothioate linkage
  modified_base 2: mod_base = OTHER; note = 2'-fluoro modified nucleotide with 3'-phosphorothioate linkage
  modified_base 3: mod_base = OTHER; note = 2'-O-methyl modified nucleotide
  modified_base 4: mod_base = OTHER; note = 2'-O-methyl modified nucleotide
  modified_base 5: mod_base = OTHER; note = 2'-O-methyl modified nucleotide
  modified_base 6: mod_base = OTHER; note = 2'-fluoro modified nucleotide
  modified_base 7: mod_base = OTHER; note = 2'-O-methyl modified nucleotide
  modified_base 8: mod_base = OTHER; note = 2'-O-methyl modified nucleotide
  modified_base 9: mod_base = OTHER; note = 2'-O-methyl modified nucleotide
  modified_base 10: mod_base = OTHER; note = 2'-O-methyl modified nucleotide
  modified_base 11: mod_base = OTHER; note = 2'-O-methyl modified nucleotide
  modified_base 12: mod_base = OTHER; note = 2'-O-methyl modified nucleotide
  modified_base 13: mod_base = OTHER; note = 2'-O-methyl modified nucleotide
  modified_base 14: mod_base = OTHER; note = 2'-fluoro modified nucleotide
  modified_base 15: mod_base = OTHER; note = 2'-O-methyl modified nucleotide
  modified_base 16: mod_base = OTHER; note = 2'-fluoro modified nucleotide
  modified_base 17: mod_base = OTHER; note = 2'-O-methyl modified nucleotide
  modified_base 18: mod_base = OTHER; note = 2'-O-methyl modified nucleotide
  modified_base 19: mod_base = OTHER; note = 2'-O-methyl modified nucleotide
  modified_base 20: mod_base = OTHER; note = 2'-O-methyl modified nucleotide
  modified_base 21: mod_base = OTHER; note = 2'-O-methyl modified nucleotide with 3'-phosphorothioate linkage
  modified_base 22: mod_base = OTHER; note = 2'-O-methyl modified nucleotide with 3'-phosphorothioate linkage
  modified_base 23: mod_base = OTHER; note = 2'-O-methyl modified nucleotide
gcactgatggtcttcgtagtagc

SEQ ID NO: 239 - RNA, 23 nt, synthetic construct
  source 1..23: mol_type = other RNA
  modified_base 1: mod_base = OTHER; note = 2'-O-methyl modified nucleotide with 3'-phosphorothioate linkage
  modified_base 2: mod_base = OTHER; note = 2'-fluoro modified nucleotide with 3'-phosphorothioate linkage
  modified_base 3: mod_base = OTHER; note = 2'-O-methyl modified nucleotide
  modified_base 4: mod_base = OTHER; note = 2'-O-methyl modified nucleotide
  modified_base 5: mod_base = OTHER; note = 2'-O-methyl modified nucleotide
  modified_base 6: mod_base = OTHER; note = 2'-fluoro modified nucleotide
  modified_base 7: mod_base = OTHER; note = 2'-O-methyl modified nucleotide
  modified_base 8: mod_base = OTHER; note = 2'-O-methyl modified nucleotide
  modified_base 9: mod_base = OTHER; note = 2'-O-methyl modified nucleotide
  modified_base 10: mod_base = OTHER; note = 2'-O-methyl modified nucleotide
  modified_base 11: mod_base = OTHER; note = 2'-O-methyl modified nucleotide
  modified_base 12: mod_base = OTHER; note = 2'-O-methyl modified nucleotide
  modified_base 13: mod_base = OTHER; note = 2'-O-methyl modified nucleotide
  modified_base 14: mod_base = OTHER; note = 2'-fluoro modified nucleotide
  modified_base 15: mod_base = OTHER; note = 2'-O-methyl modified nucleotide
  modified_base 16: mod_base = OTHER; note = 2'-fluoro modified nucleotide
  modified_base 17: mod_base = OTHER; note = 2'-O-methyl modified nucleotide
  modified_base 18: mod_base = OTHER; note = 2'-O-methyl modified nucleotide
  modified_base 19: mod_base = OTHER; note = 2'-O-methyl modified nucleotide
  modified_base 20: mod_base = OTHER; note = 2'-O-methyl modified nucleotide
  modified_base 21: mod_base = OTHER; note = 2'-O-methyl modified nucleotide with 3'-phosphorothioate linkage
  modified_base 22: mod_base = OTHER; note = 2'-O-methyl modified nucleotide with 3'-phosphorothioate linkage
  modified_base 23: mod_base = OTHER; note = 2'-O-methyl modified nucleotide
ctcgcactgatggtcttcgtagt

SEQ ID NO: 240 - RNA, 23 nt, synthetic construct
  source 1..23: mol_type = other RNA
  modified_base 1: mod_base = OTHER; note = 2'-O-methyl modified nucleotide with 3'-phosphorothioate linkage
  modified_base 2: mod_base = OTHER; note = 2'-fluoro modified nucleotide with 3'-phosphorothioate linkage
  modified_base 3: mod_base = OTHER; note = 2'-O-methyl modified nucleotide
  modified_base 4: mod_base = OTHER; note = 2'-O-methyl modified nucleotide
  modified_base 5: mod_base = OTHER; note = 2'-O-methyl modified nucleotide
  modified_base 6: mod_base = OTHER; note = 2'-fluoro modified nucleotide
  modified_base 7: mod_base = OTHER; note = 2'-O-methyl modified nucleotide
  modified_base 8: mod_base = OTHER; note = 2'-O-methyl modified nucleotide
  modified_base 9: mod_base = OTHER; note = 2'-O-methyl modified nucleotide
  modified_base 10: mod_base = OTHER; note = 2'-O-methyl modified nucleotide
  modified_base 11: mod_base = OTHER; note = 2'-O-methyl modified nucleotide
  modified_base 12: mod_base = OTHER; note = 2'-O-methyl modified nucleotide
  modified_base 13: mod_base = OTHER; note = 2'-O-methyl modified nucleotide
  modified_base 14: mod_base = OTHER; note = 2'-fluoro modified nucleotide
  modified_base 15: mod_base = OTHER; note = 2'-O-methyl modified nucleotide
  modified_base 16: mod_base = OTHER; note = 2'-fluoro modified nucleotide
  modified_base 17: mod_base = OTHER; note = 2'-O-methyl modified nucleotide
  modified_base 18: mod_base = OTHER; note = 2'-O-methyl modified nucleotide
  modified_base 19: mod_base = OTHER; note = 2'-O-methyl modified nucleotide
  modified_base 20: mod_base = OTHER; note = 2'-O-methyl modified nucleotide
  modified_base 21: mod_base = OTHER; note = 2'-O-methyl modified nucleotide with 3'-phosphorothioate linkage
  modified_base 22: mod_base = OTHER; note = 2'-O-methyl modified nucleotide with 3'-phosphorothioate linkage
  modified_base 23: mod_base = OTHER; note = 2'-O-methyl modified nucleotide
gacctcgcactgatggtcttcgt

SEQ ID NO: 241 - RNA, 23 nt, synthetic construct
  source 1..23: mol_type = other RNA
  modified_base 1: mod_base = OTHER; note = 2'-O-methyl modified nucleotide with 3'-phosphorothioate linkage
  modified_base 2: mod_base = OTHER; note = 2'-fluoro modified nucleotide with 3'-phosphorothioate linkage
  modified_base 3: mod_base = OTHER; note = 2'-O-methyl modified nucleotide
  modified_base 4: mod_base = OTHER; note = 2'-O-methyl modified nucleotide
  modified_base 5: mod_base = OTHER; note = 2'-O-methyl modified nucleotide
  modified_base 6: mod_base = OTHER; note = 2'-fluoro modified nucleotide
  modified_base 7: mod_base = OTHER; note = 2'-O-methyl modified nucleotide
  modified_base 8: mod_base = OTHER; note = 2'-O-methyl modified nucleotide
  modified_base 9: mod_base = OTHER; note = 2'-O-methyl modified nucleotide
  modified_base 10: mod_base = OTHER; note = 2'-O-methyl modified nucleotide
  modified_base 11: mod_base = OTHER; note = 2'-O-methyl modified nucleotide
  modified_base 12: mod_base = OTHER; note = 2'-O-methyl modified nucleotide
  modified_base 13: mod_base = OTHER; note = 2'-O-methyl modified nucleotide
  modified_base 14: mod_base = OTHER; note = 2'-fluoro modified nucleotide
  modified_base 15: mod_base = OTHER; note = 2'-O-methyl modified nucleotide
  modified_base 16: mod_base = OTHER; note = 2'-fluoro modified nucleotide
  modified_base 17: mod_base = OTHER; note = 2'-O-methyl modified nucleotide
  modified_base 18: mod_base = OTHER; note = 2'-O-methyl modified nucleotide
  modified_base 19: mod_base = OTHER; note = 2'-O-methyl modified nucleotide
  modified_base 20: mod_base = OTHER; note = 2'-O-methyl modified nucleotide
  modified_base 21: mod_base = OTHER; note = 2'-O-methyl modified nucleotide with 3'-phosphorothioate linkage
  modified_base 22: mod_base = OTHER; note = 2'-O-methyl modified nucleotide with 3'-phosphorothioate linkage
  modified_base 23: mod_base = OTHER; note = 2'-O-methyl modified nucleotide
ccgacctcgcactgatggtcttc

SEQ ID NO: 242 - RNA, 23 nt, synthetic construct
  source 1..23: mol_type = other RNA
  modified_base 1: mod_base = OTHER; note = 2'-O-methyl modified nucleotide with 3'-phosphorothioate linkage
  modified_base 2: mod_base = OTHER; note = 2'-fluoro modified nucleotide with 3'-phosphorothioate linkage
  modified_base 3: mod_base = OTHER; note = 2'-O-methyl modified nucleotide
  modified_base 4: mod_base = OTHER; note = 2'-O-methyl modified nucleotide
  modified_base 5: mod_base = OTHER; note = 2'-O-methyl modified nucleotide
  modified_base 6: mod_base = OTHER; note = 2'-fluoro modified nucleotide
  modified_base 7: mod_base = OTHER; note = 2'-O-methyl modified nucleotide
  modified_base 8: mod_base = OTHER; note = 2'-O-methyl modified nucleotide
  modified_base 9: mod_base = OTHER; note = 2'-O-methyl modified nucleotide
  modified_base 10: mod_base = OTHER; note = 2'-O-methyl modified nucleotide
  modified_base 11: mod_base = OTHER; note = 2'-O-methyl modified nucleotide
  modified_base 12: mod_base = OTHER; note = 2'-O-methyl modified nucleotide
  modified_base 13: mod_base = OTHER; note = 2'-O-methyl modified nucleotide
  modified_base 14: mod_base = OTHER; note = 2'-fluoro modified nucleotide
  modified_base 15: mod_base = OTHER; note = 2'-O-methyl modified nucleotide
  modified_base 16: mod_base = OTHER; note = 2'-fluoro modified nucleotide
  modified_base 17: mod_base = OTHER; note = 2'-O-methyl modified nucleotide
  modified_base 18: mod_base = OTHER; note = 2'-O-methyl modified nucleotide
  modified_base 19: mod_base = OTHER; note = 2'-O-methyl modified nucleotide
  modified_base 20: mod_base = OTHER; note = 2'-O-methyl modified nucleotide
  modified_base 21: mod_base = OTHER; note = 2'-O-methyl modified nucleotide with 3'-phosphorothioate linkage
  modified_base 22: mod_base = OTHER; note = 2'-O-methyl modified nucleotide with 3'-phosphorothioate linkage
  modified_base 23: mod_base = OTHER; note = 2'-O-methyl modified nucleotide
tgccgacctcgcactgatggtct

SEQ ID NO: 243 - RNA, 23 nt, synthetic construct
  source 1..23: mol_type = other RNA
  modified_base 1: mod_base = OTHER; note = 2'-O-methyl modified nucleotide with 3'-phosphorothioate linkage
  modified_base 2: mod_base = OTHER; note = 2'-fluoro modified nucleotide with 3'-phosphorothioate linkage
  modified_base 3: mod_base = OTHER; note = 2'-O-methyl modified nucleotide
  modified_base 4: mod_base = OTHER; note = 2'-O-methyl modified nucleotide
  modified_base 5: mod_base = OTHER; note = 2'-O-methyl modified nucleotide
  modified_base 6: mod_base = OTHER; note = 2'-fluoro modified nucleotide
  modified_base 7: mod_base = OTHER; note = 2'-O-methyl modified nucleotide
  modified_base 8: mod_base = OTHER; note = 2'-O-methyl modified nucleotide
  modified_base 9: mod_base = OTHER; note = 2'-O-methyl modified nucleotide
  modified_base 10: mod_base = OTHER; note = 2'-O-methyl modified nucleotide
  modified_base 11: mod_base = OTHER; note = 2'-O-methyl modified nucleotide
  modified_base 12: mod_base = OTHER; note = 2'-O-methyl modified nucleotide
  modified_base 13: mod_base = OTHER; note = 2'-O-methyl modified nucleotide
  modified_base 14: mod_base = OTHER; note = 2'-fluoro modified nucleotide
  modified_base 15: mod_base = OTHER; note = 2'-O-methyl modified nucleotide
  modified_base 16: mod_base = OTHER; note = 2'-fluoro modified nucleotide
  modified_base 17: mod_base = OTHER; note = 2'-O-methyl modified nucleotide
  modified_base 18: mod_base = OTHER; note = 2'-O-methyl modified nucleotide
  modified_base 19: mod_base = OTHER; note = 2'-O-methyl modified nucleotide
  modified_base 20: mod_base = OTHER; note = 2'-O-methyl modified nucleotide
  modified_base 21: mod_base = OTHER; note = 2'-O-methyl modified nucleotide with 3'-phosphorothioate linkage
  modified_base 22: mod_base = OTHER; note = 2'-O-methyl modified nucleotide with 3'-phosphorothioate linkage
  modified_base 23: mod_base = OTHER; note = 2'-O-methyl modified nucleotide
catgccgacctcgcactgatggt

SEQ ID NO: 244 - RNA, 23 nt, synthetic construct
  source 1..23: mol_type = other RNA
  modified_base 1: mod_base = OTHER; note = 2'-O-methyl modified nucleotide with 3'-phosphorothioate linkage
  modified_base 2: mod_base = OTHER; note = 2'-fluoro modified nucleotide with 3'-phosphorothioate linkage
  modified_base 3: mod_base = OTHER; note = 2'-O-methyl modified nucleotide
  modified_base 4: mod_base = OTHER; note = 2'-O-methyl modified nucleotide
  modified_base 5: mod_base = OTHER; note = 2'-O-methyl modified nucleotide
  modified_base 6: mod_base = OTHER; note = 2'-fluoro modified nucleotide
  modified_base 7: mod_base = OTHER; note = 2'-O-methyl modified nucleotide
  modified_base 8: mod_base = OTHER; note = 2'-O-methyl modified nucleotide
  modified_base 9: mod_base = OTHER; note = 2'-O-methyl modified nucleotide
  modified_base 10: mod_base = OTHER; note = 2'-O-methyl modified nucleotide
  modified_base 11: mod_base = OTHER; note = 2'-O-methyl modified nucleotide
  modified_base 12: mod_base = OTHER; note = 2'-O-methyl modified nucleotide
  modified_base 13: mod_base = OTHER; note = 2'-O-methyl modified nucleotide
  modified_base 14: mod_base = OTHER; note = 2'-fluoro modified nucleotide
  modified_base 15: mod_base = OTHER; note = 2'-O-methyl modified nucleotide
  modified_base 16: mod_base = OTHER; note = 2'-fluoro modified nucleotide
  modified_base 17: mod_base = OTHER; note = 2'-O-methyl modified nucleotide
  modified_base 18: mod_base = OTHER; note = 2'-O-methyl modified nucleotide
  modified_base 19: mod_base = OTHER; note = 2'-O-methyl modified nucleotide
  modified_base 20: mod_base = OTHER; note = 2'-O-methyl modified nucleotide
  modified_base 21: mod_base = OTHER; note = 2'-O-methyl modified nucleotide with 3'-phosphorothioate linkage
  modified_base 22: mod_base = OTHER; note = 2'-O-methyl modified nucleotide with 3'-phosphorothioate linkage
  modified_base 23: mod_base = OTHER; note = 2'-O-methyl modified nucleotide
atcatgccgacctcgcactgatg

SEQ ID NO: 245 - RNA, 23 nt, synthetic construct
  source 1..23: mol_type = other RNA
  modified_base 1: mod_base = OTHER; note = 2'-O-methyl modified nucleotide with 3'-phosphorothioate linkage
  modified_base 2: mod_base = OTHER; note = 2'-fluoro modified nucleotide with 3'-phosphorothioate linkage
  modified_base 3: mod_base = OTHER; note = 2'-O-methyl modified nucleotide
  modified_base 4: mod_base = OTHER; note = 2'-O-methyl modified nucleotide
  modified_base 5: mod_base = OTHER; note = 2'-O-methyl modified nucleotide
  modified_base 6: mod_base = OTHER; note = 2'-fluoro modified nucleotide
  modified_base 7: mod_base = OTHER; note = 2'-O-methyl modified nucleotide
  modified_base 8: mod_base = OTHER; note = 2'-O-methyl modified nucleotide
  modified_base 9: mod_base = OTHER; note = 2'-O-methyl modified nucleotide
  modified_base 10: mod_base = OTHER; note = 2'-O-methyl modified nucleotide
  modified_base 11: mod_base = OTHER; note = 2'-O-methyl modified nucleotide
  modified_base 12: mod_base = OTHER; note = 2'-O-methyl modified nucleotide
  modified_base 13: mod_base = OTHER; note = 2'-O-methyl modified nucleotide
  modified_base 14: mod_base = OTHER; note = 2'-fluoro modified nucleotide
  modified_base 15: mod_base = OTHER; note = 2'-O-methyl modified nucleotide
  modified_base 16: mod_base = OTHER; note = 2'-fluoro modified nucleotide
  modified_base 17: mod_base = OTHER; note = 2'-O-methyl modified nucleotide
  modified_base 18: mod_base = OTHER; note = 2'-O-methyl modified nucleotide
  modified_base 19: mod_base = OTHER; note = 2'-O-methyl modified nucleotide
  modified_base 20: mod_base = OTHER; note = 2'-O-methyl modified nucleotide
  modified_base 21: mod_base = OTHER; note = 2'-O-methyl modified nucleotide with 3'-phosphorothioate linkage
  modified_base 22: mod_base = OTHER; note = 2'-O-methyl modified nucleotide with 3'-phosphorothioate linkage
  modified_base 23: mod_base = OTHER; note = 2'-O-methyl modified nucleotide
ccacattctgcatctcctccatg

SEQ ID NO: 246 - RNA, 23 nt, synthetic construct
  source 1..23: mol_type = other RNA
  modified_base 1: mod_base = OTHER; note = 2'-O-methyl modified nucleotide with 3'-phosphorothioate linkage
  modified_base 2: mod_base = OTHER; note = 2'-fluoro modified nucleotide with 3'-phosphorothioate linkage
  modified_base 3: mod_base = OTHER; note = 2'-O-methyl modified nucleotide
  modified_base 4: mod_base = OTHER; note = 2'-O-methyl modified nucleotide
  modified_base 5: mod_base = OTHER; note = 2'-O-methyl modified nucleotide
  modified_base 6: mod_base = OTHER; note = 2'-fluoro modified nucleotide
  modified_base 7: mod_base = OTHER; note = 2'-O-methyl modified nucleotide
  modified_base 8: mod_base = OTHER; note = 2'-O-methyl modified nucleotide
  modified_base 9: mod_base = OTHER; note = 2'-O-methyl modified nucleotide
  modified_base 10: mod_base = OTHER; note = 2'-O-methyl modified nucleotide
  modified_base 11: mod_base = OTHER; note = 2'-O-methyl modified nucleotide
  modified_base 12: mod_base = OTHER; note = 2'-O-methyl modified nucleotide
  modified_base 13: mod_base = OTHER; note = 2'-O-methyl modified nucleotide
  modified_base 14: mod_base = OTHER; note = 2'-fluoro modified nucleotide
  modified_base 15: mod_base = OTHER; note = 2'-O-methyl modified nucleotide
  modified_base 16: mod_base = OTHER; note = 2'-fluoro modified nucleotide
  modified_base 17: mod_base = OTHER; note = 2'-O-methyl modified nucleotide
  modified_base 18: mod_base = OTHER; note = 2'-O-methyl modified nucleotide
  modified_base 19: mod_base = OTHER; note = 2'-O-methyl modified nucleotide
  modified_base 20: mod_base = OTHER; note = 2'-O-methyl modified nucleotide
  modified_base 21: mod_base = OTHER; note = 2'-O-methyl modified nucleotide with 3'-phosphorothioate linkage
  modified_base 22: mod_base = OTHER; note = 2'-O-methyl modified nucleotide with 3'-phosphorothioate linkage
  modified_base 23: mod_base = OTHER; note = 2'-O-methyl modified nucleotide
aggcggtcatactccagcaggaa

SEQ ID NO: 247 - RNA, 23 nt, synthetic construct
  source 1..23: mol_type = other RNA
  modified_base 1: mod_base = OTHER; note = 2'-O-methyl modified nucleotide with 3'-phosphorothioate linkage
  modified_base 2: mod_base = OTHER; note = 2'-fluoro modified nucleotide with 3'-phosphorothioate linkage
  modified_base 3: mod_base = OTHER; note = 2'-O-methyl modified nucleotide
  modified_base 4: mod_base = OTHER; note = 2'-O-methyl modified nucleotide
  modified_base 5: mod_base = OTHER; note = 2'-O-methyl modified nucleotide
  modified_base 6: mod_base = OTHER; note = 2'-fluoro modified nucleotide
  modified_base 7: mod_base = OTHER; note = 2'-O-methyl modified nucleotide
  modified_base 8: mod_base = OTHER; note = 2'-O-methyl modified nucleotide
  modified_base 9: mod_base = OTHER; note = 2'-O-methyl modified nucleotide
  modified_base 10: mod_base = OTHER; note = 2'-O-methyl modified nucleotide
  modified_base 11: mod_base = OTHER; note = 2'-O-methyl modified nucleotide
  modified_base 12: mod_base = OTHER; note = 2'-O-methyl modified nucleotide
  modified_base 13: mod_base = OTHER; note = 2'-O-methyl modified nucleotide
  modified_base 14: mod_base = OTHER; note = 2'-fluoro modified nucleotide
  modified_base 15: mod_base = OTHER; note = 2'-O-methyl modified nucleotide
  modified_base 16: mod_base = OTHER; note = 2'-fluoro modified nucleotide
  modified_base 17: mod_base = OTHER; note = 2'-O-methyl modified nucleotide
  modified_base 18: mod_base = OTHER; note = 2'-O-methyl modified nucleotide
  modified_base 19: mod_base = OTHER; note = 2'-O-methyl modified nucleotide
  modified_base 20: mod_base = OTHER; note = 2'-O-methyl modified nucleotide
  modified_base 21: mod_base = OTHER; note = 2'-O-methyl modified nucleotide with 3'-phosphorothioate linkage
  modified_base 22: mod_base = OTHER; note = 2'-O-methyl modified nucleotide with 3'-phosphorothioate linkage
  modified_base 23: mod_base = OTHER; note = 2'-O-methyl modified nucleotide
tccaccaggcggtcatactccag

SEQ ID NO: 248 - RNA, 23 nt, synthetic construct
  source 1..23: mol_type = other RNA
  modified_base 1: mod_base = OTHER; note = 2'-O-methyl modified nucleotide with 3'-phosphorothioate linkage
  modified_base 2: mod_base = OTHER; note = 2'-fluoro modified nucleotide with 3'-phosphorothioate linkage
  modified_base 3: mod_base = OTHER; note = 2'-O-methyl modified nucleotide
  modified_base 4: mod_base = OTHER; note = 2'-O-methyl modified nucleotide
  modified_base 5: mod_base = OTHER; note = 2'-O-methyl modified nucleotide
  modified_base 6: mod_base = OTHER; note = 2'-fluoro modified nucleotide
  modified_base 7: mod_base = OTHER; note = 2'-O-methyl modified nucleotide
  modified_base 8: mod_base = OTHER; note = 2'-O-methyl modified nucleotide
  modified_base 9: mod_base = OTHER; note = 2'-O-methyl modified nucleotide
  modified_base 10: mod_base = OTHER; note = 2'-O-methyl modified nucleotide
  modified_base 11: mod_base = OTHER; note = 2'-O-methyl modified nucleotide
  modified_base 12: mod_base = OTHER; note = 2'-O-methyl modified nucleotide
  modified_base 13: mod_base = OTHER; note = 2'-O-methyl modified nucleotide
  modified_base 14: mod_base = OTHER; note = 2'-fluoro modified nucleotide
  modified_base 15: mod_base = OTHER; note = 2'-O-methyl modified nucleotide
  modified_base 16: mod_base = OTHER; note = 2'-fluoro modified nucleotide
  modified_base 17: mod_base = OTHER; note = 2'-O-methyl modified nucleotide
  modified_base 18: mod_base = OTHER; note = 2'-O-methyl modified nucleotide
  modified_base 19: mod_base = OTHER; note = 2'-O-methyl modified nucleotide
  modified_base 20: mod_base = OTHER; note = 2'-O-methyl modified nucleotide
  modified_base 21: mod_base = OTHER; note = 2'-O-methyl modified nucleotide with 3'-phosphorothioate linkage
  modified_base 22: mod_base = OTHER; note = 2'-O-methyl modified nucleotide with 3'-phosphorothioate linkage
  modified_base 23: mod_base = OTHER; note = 2'-O-methyl modified nucleotide
gtccaccaggcggtcatactcca

SEQ ID NO: 249 - RNA, 23 nt, synthetic construct
  source 1..23: mol_type = other RNA
  modified_base 1: mod_base = OTHER; note = 2'-O-methyl modified nucleotide with 3'-phosphorothioate linkage
  modified_base 2: mod_base = OTHER; note = 2'-fluoro modified nucleotide with 3'-phosphorothioate linkage
  modified_base 3: mod_base = OTHER; note = 2'-O-methyl modified nucleotide
  modified_base 4: mod_base = OTHER; note = 2'-O-methyl modified nucleotide
  modified_base 5: mod_base = OTHER; note = 2'-O-methyl modified nucleotide
  modified_base 6: mod_base = OTHER; note = 2'-fluoro modified nucleotide
  modified_base 7: mod_base = OTHER; note = 2'-O-methyl modified nucleotide
  modified_base 8: mod_base = OTHER; note = 2'-O-methyl modified nucleotide
  modified_base 9: mod_base = OTHER; note = 2'-O-methyl modified nucleotide
  modified_base 10: mod_base = OTHER; note = 2'-O-methyl modified nucleotide
  modified_base 11: mod_base = OTHER; note = 2'-O-methyl modified nucleotide
  modified_base 12: mod_base = OTHER; note = 2'-O-methyl modified nucleotide
  modified_base 13: mod_base = OTHER; note = 2'-O-methyl modified nucleotide
  modified_base 14: mod_base = OTHER; note = 2'-fluoro modified nucleotide
  modified_base 15: mod_base = OTHER; note = 2'-O-methyl modified nucleotide
  modified_base 16: mod_base = OTHER; note = 2'-fluoro modified nucleotide
  modified_base 17: mod_base = OTHER; note = 2'-O-methyl modified nucleotide
  modified_base 18: mod_base = OTHER; note = 2'-O-methyl modified nucleotide
  modified_base 19: mod_base = OTHER; note = 2'-O-methyl modified nucleotide
  modified_base 20: mod_base = OTHER; note = 2'-O-methyl modified nucleotide
  modified_base 21: mod_base = OTHER; note = 2'-O-methyl modified nucleotide with 3'-phosphorothioate linkage
  modified_base 22: mod_base = OTHER; note = 2'-O-methyl modified nucleotide with 3'-phosphorothioate linkage
  modified_base 23: mod_base = OTHER; note = 2'-O-methyl modified nucleotide
cgtccaccaggcggtcatactcc

SEQ ID NO: 250 - RNA, 23 nt, synthetic construct
  source 1..23: mol_type = other RNA
  modified_base 1: mod_base = OTHER; note = 2'-O-methyl modified nucleotide with 3'-phosphorothioate linkage
  modified_base 2: mod_base = OTHER; note = 2'-fluoro modified nucleotide with 3'-phosphorothioate linkage
  modified_base 3: mod_base = OTHER; note = 2'-O-methyl modified nucleotide
  modified_base 4: mod_base = OTHER; note = 2'-O-methyl modified nucleotide
  modified_base 5: mod_base = OTHER; note = 2'-O-methyl modified nucleotide
  modified_base 6: mod_base = OTHER; note = 2'-fluoro modified nucleotide
  modified_base 7: mod_base = OTHER; note = 2'-O-methyl modified nucleotide
  modified_base 8: mod_base = OTHER; note = 2'-O-methyl modified nucleotide
  modified_base 9: mod_base = OTHER; note = 2'-O-methyl modified nucleotide
  modified_base 10: mod_base = OTHER; note = 2'-O-methyl modified nucleotide
  modified_base 11: mod_base = OTHER; note = 2'-O-methyl modified nucleotide
  modified_base 12: mod_base = OTHER; note = 2'-O-methyl modified nucleotide
  modified_base 13: mod_base = OTHER; note = 2'-O-methyl modified nucleotide
  modified_base 14: mod_base = OTHER; note = 2'-fluoro modified nucleotide
  modified_base 15: mod_base = OTHER; note = 2'-O-methyl modified nucleotide
  modified_base 16: mod_base = OTHER; note = 2'-fluoro modified nucleotide
  modified_base 17: mod_base = OTHER; note = 2'-O-methyl modified nucleotide
  modified_base 18: mod_base = OTHER; note = 2'-O-methyl modified nucleotide
  modified_base 19: mod_base = OTHER; note = 2'-O-methyl modified nucleotide
  modified_base 20: mod_base = OTHER; note = 2'-O-methyl modified nucleotide
  modified_base 21: mod_base = OTHER; note = 2'-O-methyl modified nucleotide with 3'-phosphorothioate linkage
  modified_base 22: mod_base = OTHER; note = 2'-O-methyl modified nucleotide with 3'-phosphorothioate linkage
  modified_base 23: mod_base = OTHER; note = 2'-O-methyl modified nucleotide
tcgtccaccaggcggtcatactc

SEQ ID NO: 251 - RNA, 23 nt, synthetic construct
  source 1..23: mol_type = other RNA
  modified_base 1: mod_base = OTHER; note = 2'-O-methyl modified nucleotide with 3'-phosphorothioate linkage
  modified_base 2: mod_base = OTHER; note = 2'-fluoro modified nucleotide with 3'-phosphorothioate linkage
  modified_base 3: mod_base = OTHER; note = 2'-O-methyl modified nucleotide
  modified_base 4: mod_base = OTHER; note = 2'-O-methyl modified nucleotide
  modified_base 5: mod_base = OTHER; note = 2'-O-methyl modified nucleotide
  modified_base 6: mod_base = OTHER; note = 2'-fluoro modified nucleotide
  modified_base 7: mod_base = OTHER; note = 2'-O-methyl modified nucleotide
  modified_base 8: mod_base = OTHER; note = 2'-O-methyl modified nucleotide
  modified_base 9: mod_base = OTHER; note = 2'-O-methyl modified nucleotide
  modified_base 10: mod_base = OTHER; note = 2'-O-methyl modified nucleotide
  modified_base 11: mod_base = OTHER; note = 2'-O-methyl modified nucleotide
  modified_base 12: mod_base = OTHER; note = 2'-O-methyl modified nucleotide
  modified_base 13: mod_base = OTHER; note = 2'-O-methyl modified nucleotide
  modified_base 14: mod_base = OTHER; note = 2'-fluoro modified nucleotide
  modified_base 15: mod_base = OTHER; note = 2'-O-methyl modified nucleotide
  modified_base 16: mod_base = OTHER; note = 2'-fluoro modified nucleotide
  modified_base 17: mod_base = OTHER; note = 2'-O-methyl modified nucleotide
  modified_base 18: mod_base = OTHER; note = 2'-O-methyl modified nucleotide
  modified_base 19: mod_base = OTHER; note = 2'-O-methyl modified nucleotide
  modified_base 20: mod_base = OTHER; note = 2'-O-methyl modified nucleotide
  modified_base 21: mod_base = OTHER; note = 2'-O-methyl modified nucleotide with 3'-phosphorothioate linkage
  modified_base 22: mod_base = OTHER; note = 2'-O-methyl modified nucleotide with 3'-phosphorothioate linkage
  modified_base 23: mod_base = OTHER; note = 2'-O-methyl modified nucleotide
ctcgtccaccaggcggtcatact

SEQ ID NO: 252 - RNA, 23 nt, synthetic construct
  source 1..23: mol_type = other RNA
  modified_base 1: mod_base = OTHER; note = 2'-O-methyl modified nucleotide with 3'-phosphorothioate linkage
  modified_base 2: mod_base = OTHER; note = 2'-fluoro modified nucleotide with 3'-phosphorothioate linkage
  modified_base 3: mod_base = OTHER; note = 2'-O-methyl modified nucleotide
  modified_base 4: mod_base = OTHER; note = 2'-O-methyl modified nucleotide
  modified_base 5: mod_base = OTHER; note = 2'-O-methyl modified nucleotide
  modified_base 6: mod_base = OTHER; note = 2'-fluoro modified nucleotide
  modified_base 7: mod_base = OTHER; note = 2'-O-methyl modified nucleotide
  modified_base 8: mod_base = OTHER; note = 2'-O-methyl modified nucleotide
  modified_base 9: mod_base = OTHER; note = 2'-O-methyl modified nucleotide
  modified_base 10: mod_base = OTHER; note = 2'-O-methyl modified nucleotide
  modified_base 11: mod_base = OTHER; note = 2'-O-methyl modified nucleotide
  modified_base 12: mod_base = OTHER; note = 2'-O-methyl modified nucleotide
  modified_base 13: mod_base = OTHER; note = 2'-O-methyl modified nucleotide
  modified_base 14: mod_base = OTHER; note = 2'-fluoro modified nucleotide
  modified_base 15: mod_base = OTHER; note = 2'-O-methyl modified nucleotide
  modified_base 16: mod_base = OTHER; note = 2'-fluoro modified nucleotide
  modified_base 17: mod_base = OTHER; note = 2'-O-methyl modified nucleotide
  modified_base 18: mod_base = OTHER; note = 2'-O-methyl modified nucleotide
  modified_base 19: mod_base = OTHER; note = 2'-O-methyl modified nucleotide
  modified_base 20: mod_base = OTHER; note = 2'-O-methyl modified nucleotide
  modified_base 21: mod_base = OTHER; note = 2'-O-methyl modified nucleotide with 3'-phosphorothioate linkage
  modified_base 22: mod_base = OTHER; note = 2'-O-methyl modified nucleotide with 3'-phosphorothioate linkage
  modified_base 23: mod_base = OTHER; note = 2'-O-methyl modified nucleotide
gagcttctcatacagctgctgac

SEQ ID NO: 253 - RNA, 23 nt, synthetic construct
  source 1..23: mol_type = other RNA
  modified_base 1: mod_base = OTHER; note = 2'-O-methyl modified nucleotide with 3'-phosphorothioate linkage
  modified_base 2: mod_base = OTHER; note = 2'-fluoro modified nucleotide with 3'-phosphorothioate linkage
  modified_base 3: mod_base = OTHER; note = 2'-O-methyl modified nucleotide
  modified_base 4: mod_base = OTHER; note = 2'-O-methyl modified nucleotide
  modified_base 5: mod_base = OTHER; note = 2'-O-methyl modified nucleotide
  modified_base 6: mod_base = OTHER; note = 2'-fluoro modified nucleotide
  modified_base 7: mod_base = OTHER; note = 2'-O-methyl modified nucleotide
  modified_base 8: mod_base = OTHER; note = 2'-O-methyl modified nucleotide
  modified_base 9: mod_base = OTHER; note = 2'-O-methyl modified nucleotide
  modified_base 10: mod_base = OTHER; note = 2'-O-methyl modified nucleotide
  modified_base 11: mod_base = OTHER; note = 2'-O-methyl modified nucleotide
  modified_base 12: mod_base = OTHER; note = 2'-O-methyl modified nucleotide
  modified_base 13: mod_base = OTHER; note = 2'-O-methyl modified nucleotide
  modified_base 14: mod_base = OTHER; note = 2'-fluoro modified nucleotide
  modified_base 15: mod_base = OTHER; note = 2'-O-methyl modified nucleotide
  modified_base 16: mod_base = OTHER; note = 2'-fluoro modified nucleotide
  modified_base 17: mod_base = OTHER; note = 2'-O-methyl modified nucleotide
  modified_base 18: mod_base = OTHER; note = 2'-O-methyl modified nucleotide
  modified_base 19: mod_base = OTHER; note = 2'-O-methyl modified nucleotide
  modified_base 20: mod_base = OTHER; note = 2'-O-methyl modified nucleotide
  modified_base 21: mod_base = OTHER; note = 2'-O-methyl modified nucleotide with 3'-phosphorothioate linkage
  modified_base 22: mod_base = OTHER; note = 2'-O-methyl modified nucleotide with 3'-phosphorothioate linkage
  modified_base 23: mod_base = OTHER; note = 2'-O-methyl modified nucleotide
cctatgagcttctcatacagctg

SEQ ID NO: 254 - RNA, 23 nt, synthetic construct
  source 1..23: mol_type = other RNA
  modified_base 1: mod_base = OTHER; note = 2'-O-methyl modified nucleotide with 3'-phosphorothioate linkage
  modified_base 2: mod_base = OTHER; note = 2'-fluoro modified nucleotide with 3'-phosphorothioate linkage
  modified_base 3: mod_base = OTHER; note = 2'-O-methyl modified nucleotide
  modified_base 4: mod_base = OTHER; note = 2'-O-methyl modified nucleotide
  modified_base 5: mod_base = OTHER; note = 2'-O-methyl modified nucleotide
  modified_base 6: mod_base = OTHER; note = 2'-fluoro modified nucleotide
  modified_base 7: mod_base = OTHER; note = 2'-O-methyl modified nucleotide
  modified_base 8: mod_base = OTHER; note = 2'-O-methyl modified nucleotide
  modified_base 9: mod_base = OTHER; note = 2'-O-methyl modified nucleotide
  modified_base 10: mod_base = OTHER; note = 2'-O-methyl modified nucleotide
  modified_base 11: mod_base = OTHER; note = 2'-O-methyl modified nucleotide
  modified_base 12: mod_base = OTHER; note = 2'-O-methyl modified nucleotide
  modified_base 13: mod_base = OTHER; note = 2'-O-methyl modified nucleotide
  modified_base 14: mod_base = OTHER; note = 2'-fluoro modified nucleotide
  modified_base 15: mod_base = OTHER; note = 2'-O-methyl modified nucleotide
  modified_base 16: mod_base = OTHER; note = 2'-fluoro modified nucleotide
  modified_base 17: mod_base = OTHER; note = 2'-O-methyl modified nucleotide
  modified_base 18: mod_base = OTHER; note = 2'-O-methyl modified nucleotide
  modified_base 19: mod_base = OTHER; note = 2'-O-methyl modified nucleotide
  modified_base 20: mod_base = OTHER; note = 2'-O-methyl modified nucleotide
  modified_base 21: mod_base = OTHER; note = 2'-O-methyl modified nucleotide with 3'-phosphorothioate linkage
  modified_base 22: mod_base = OTHER; note = 2'-O-methyl modified nucleotide with 3'-phosphorothioate linkage
  modified_base 23: mod_base = OTHER; note = 2'-O-methyl modified nucleotide
cacctatgagcttctcatacagc

SEQ ID NO: 255 - RNA, 23 nt, synthetic construct
  source 1..23: mol_type = other RNA
  modified_base 1: mod_base = OTHER; note = 2'-O-methyl modified nucleotide with 3'-phosphorothioate linkage
  modified_base 2: mod_base = OTHER; note = 2'-fluoro modified nucleotide with 3'-phosphorothioate linkage
  modified_base 3: mod_base = OTHER; note = 2'-O-methyl modified nucleotide
  modified_base 4: mod_base = OTHER; note = 2'-O-methyl modified nucleotide
  modified_base 5: mod_base = OTHER; note = 2'-O-methyl modified nucleotide
  modified_base 6: mod_base = OTHER; note = 2'-fluoro modified nucleotide
  modified_base 7: mod_base = OTHER; note = 2'-O-methyl modified nucleotide
  modified_base 8: mod_base = OTHER; note = 2'-O-methyl modified nucleotide
  modified_base 9: mod_base = OTHER; note = 2'-O-methyl modified nucleotide
  modified_base 10: mod_base = OTHER; note = 2'-O-methyl modified nucleotide
  modified_base 11: mod_base = OTHER; note = 2'-O-methyl modified nucleotide
  modified_base 12: mod_base = OTHER; note = 2'-O-methyl modified nucleotide
  modified_base 13: mod_base = OTHER; note = 2'-O-methyl modified nucleotide
  modified_base 14: mod_base = OTHER; note = 2'-fluoro modified nucleotide
  modified_base 15: mod_base = OTHER; note = 2'-O-methyl modified nucleotide
  modified_base 16: mod_base = OTHER; note = 2'-fluoro modified nucleotide
  modified_base 17: mod_base = OTHER; note = 2'-O-methyl modified nucleotide
  modified_base 18: mod_base = OTHER; note = 2'-O-methyl modified nucleotide
  modified_base 19: mod_base = OTHER; note = 2'-O-methyl modified nucleotide
  modified_base 20: mod_base = OTHER; note = 2'-O-methyl modified nucleotide
  modified_base 21: mod_base = OTHER; note = 2'-O-methyl modified nucleotide with 3'-phosphorothioate linkage
  modified_base 22: mod_base = OTHER; note = 2'-O-methyl modified nucleotide with 3'-phosphorothioate linkage
  modified_base 23: mod_base = OTHER; note = 2'-O-methyl modified nucleotide
ccacctatgagcttctcatacag

SEQ ID NO: 256 - RNA, 23 nt, synthetic construct
  source 1..23: mol_type = other RNA
  modified_base 1: mod_base = OTHER; note = 2'-O-methyl modified nucleotide with 3'-phosphorothioate linkage
  modified_base 2: mod_base = OTHER; note = 2'-fluoro modified nucleotide with 3'-phosphorothioate linkage
  modified_base 3: mod_base = OTHER; note = 2'-O-methyl modified nucleotide
  modified_base 4: mod_base = OTHER; note = 2'-O-methyl modified nucleotide
  modified_base 5: mod_base = OTHER; note = 2'-O-methyl modified nucleotide
  modified_base 6: mod_base = OTHER; note = 2'-fluoro modified nucleotide
  modified_base 7: mod_base = OTHER; note = 2'-O-methyl modified nucleotide
  modified_base 8: mod_base = OTHER; note = 2'-O-methyl modified nucleotide
  modified_base 9: mod_base = OTHER; note = 2'-O-methyl modified nucleotide
  modified_base 10: mod_base = OTHER; note = 2'-O-methyl modified nucleotide
  modified_base 11: mod_base = OTHER; note = 2'-O-methyl modified nucleotide
  modified_base 12: mod_base = OTHER; note = 2'-O-methyl modified nucleotide
  modified_base 13: mod_base = OTHER; note = 2'-O-methyl modified nucleotide
  modified_base 14: mod_base = OTHER; note = 2'-fluoro modified nucleotide
  modified_base 15: mod_base = OTHER; note = 2'-O-methyl modified nucleotide
  modified_base 16: mod_base = OTHER; note = 2'-fluoro modified nucleotide
  modified_base 17: mod_base = OTHER; note = 2'-O-methyl modified nucleotide
  modified_base 18: mod_base = OTHER; note = 2'-O-methyl modified nucleotide
  modified_base 19: mod_base = OTHER; note = 2'-O-methyl modified nucleotide
  modified_base 20: mod_base = OTHER; note = 2'-O-methyl modified nucleotide
  modified_base 21: mod_base = OTHER; note = 2'-O-methyl modified nucleotide with 3'-phosphorothioate linkage
  modified_base 22: mod_base = OTHER; note = 2'-O-methyl modified nucleotide with 3'-phosphorothioate linkage
  modified_base 23: mod_base = OTHER; note = 2'-O-methyl modified nucleotide
gccacctatgagcttctcataca

SEQ ID NO: 257 - RNA, 23 nt, synthetic construct
  source 1..23: mol_type = other RNA
  modified_base 1: mod_base = OTHER; note = 2'-O-methyl modified nucleotide with 3'-phosphorothioate linkage
  modified_base 2: mod_base = OTHER; note = 2'-fluoro modified nucleotide with 3'-phosphorothioate linkage
  modified_base 3: mod_base = OTHER; note = 2'-O-methyl modified nucleotide
  modified_base 4: mod_base = OTHER; note = 2'-O-methyl modified nucleotide
  modified_base 5: mod_base = OTHER; note = 2'-O-methyl modified nucleotide
  modified_base 6: mod_base = OTHER; note = 2'-fluoro modified nucleotide
  modified_base 7: mod_base = OTHER; note = 2'-O-methyl modified nucleotide
  modified_base 8: mod_base = OTHER; note = 2'-O-methyl modified nucleotide
  modified_base 9: mod_base = OTHER; note = 2'-O-methyl modified nucleotide
  modified_base 10: mod_base = OTHER; note = 2'-O-methyl modified nucleotide
  modified_base 11: mod_base = OTHER; note = 2'-O-methyl modified nucleotide
  modified_base 12: mod_base = OTHER; note = 2'-O-methyl modified nucleotide
  modified_base 13: mod_base = OTHER; note = 2'-O-methyl modified nucleotide
  modified_base 14: mod_base = OTHER; note = 2'-fluoro modified nucleotide
  modified_base 15: mod_base = OTHER; note = 2'-O-methyl modified nucleotide
  modified_base 16: mod_base = OTHER; note = 2'-fluoro modified nucleotide
  modified_base 17: mod_base = OTHER; note = 2'-O-methyl modified nucleotide
  modified_base 18: mod_base = OTHER; note = 2'-O-methyl modified nucleotide
  modified_base 19: mod_base = OTHER; note = 2'-O-methyl modified nucleotide
  modified_base 20: mod_base = OTHER; note = 2'-O-methyl modified nucleotide
  modified_base 21: mod_base = OTHER; note = 2'-O-methyl modified nucleotide with 3'-phosphorothioate linkage
  modified_base 22: mod_base = OTHER; note = 2'-O-methyl modified nucleotide with 3'-phosphorothioate linkage
  modified_base 23: mod_base = OTHER; note = 2'-O-methyl modified nucleotide
tgccacctatgagcttctcatac

SEQ ID NO: 258 - RNA, 23 nt, synthetic construct
  source 1..23: mol_type = other RNA
  modified_base 1: mod_base = OTHER; note = 2'-O-methyl modified nucleotide with 3'-phosphorothioate linkage
  modified_base 2: mod_base = OTHER; note = 2'-fluoro modified nucleotide with 3'-phosphorothioate linkage
  modified_base 3: mod_base = OTHER; note = 2'-O-methyl modified nucleotide
  modified_base 4: mod_base = OTHER; note = 2'-O-methyl modified nucleotide
  modified_base 5: mod_base = OTHER; note = 2'-O-methyl modified nucleotide
  modified_base 6: mod_base = OTHER; note = 2'-fluoro modified nucleotide
  modified_base 7: mod_base = OTHER; note = 2'-O-methyl modified nucleotide
  modified_base 8: mod_base = OTHER; note = 2'-O-methyl modified nucleotide
  modified_base 9: mod_base = OTHER; note = 2'-O-methyl modified nucleotide
  modified_base 10: mod_base = OTHER; note = 2'-O-methyl modified nucleotide
  modified_base 11: mod_base = OTHER; note = 2'-O-methyl modified nucleotide
  modified_base 12: mod_base = OTHER; note = 2'-O-methyl modified nucleotide
  modified_base 13: mod_base = OTHER; note = 2'-O-methyl modified nucleotide
  modified_base 14: mod_base = OTHER; note = 2'-fluoro modified nucleotide
  modified_base 15: mod_base = OTHER; note = 2'-O-methyl modified nucleotide
  modified_base 16: mod_base = OTHER; note = 2'-fluoro modified nucleotide
  modified_base 17: mod_base = OTHER; note = 2'-O-methyl modified nucleotide
  modified_base 18: mod_base = OTHER; note = 2'-O-methyl modified nucleotide
  modified_base 19: mod_base = OTHER; note = 2'-O-methyl modified nucleotide
  modified_base 20: mod_base = OTHER; note = 2'-O-methyl modified nucleotide
  modified_base 21: mod_base = OTHER; note = 2'-O-methyl modified nucleotide with 3'-phosphorothioate linkage
  modified_base 22: mod_base = OTHER; note = 2'-O-methyl modified nucleotide with 3'-phosphorothioate linkage
  modified_base 23: mod_base = OTHER; note = 2'-O-methyl modified nucleotide
gtacttgccacctatgagcttct

SEQ ID NO: 259 - RNA, 23 nt, synthetic construct
  source 1..23: mol_type = other RNA
  modified_base 1: mod_base = OTHER; note = 2'-O-methyl modified nucleotide with 3'-phosphorothioate linkage
  modified_base 2: mod_base = OTHER; note = 2'-fluoro modified nucleotide with 3'-phosphorothioate linkage
  modified_base 3: mod_base = OTHER; note = 2'-O-methyl modified nucleotide
  modified_base 4: mod_base = OTHER; note = 2'-O-methyl modified nucleotide
  modified_base 5: mod_base = OTHER; note = 2'-O-methyl modified nucleotide
  modified_base 6: mod_base = OTHER; note = 2'-fluoro modified nucleotide
  modified_base 7: mod_base = OTHER; note = 2'-O-methyl modified nucleotide
  modified_base 8: mod_base = OTHER; note = 2'-O-methyl modified nucleotide
  modified_base 9: mod_base = OTHER; note = 2'-O-methyl modified nucleotide
  modified_base 10: mod_base = OTHER; note = 2'-O-methyl modified nucleotide
  modified_base 11: mod_base = OTHER; note = 2'-O-methyl modified nucleotide
  modified_base 12: mod_base = OTHER; note = 2'-O-methyl modified nucleotide
  modified_base 13: mod_base = OTHER; note = 2'-O-methyl modified nucleotide
  modified_base 14: mod_base = OTHER; note = 2'-fluoro modified nucleotide
  modified_base 15: mod_base = OTHER; note = 2'-O-methyl modified nucleotide
  modified_base 16: mod_base = OTHER; note = 2'-fluoro modified nucleotide
  modified_base 17: mod_base = OTHER; note = 2'-O-methyl modified nucleotide
  modified_base 18: mod_base = OTHER; note = 2'-O-methyl modified nucleotide
  modified_base 19: mod_base = OTHER; note = 2'-O-methyl modified nucleotide
  modified_base 20: mod_base = OTHER; note = 2'-O-methyl modified nucleotide
  modified_base 21: mod_base = OTHER; note = 2'-O-methyl modified nucleotide with 3'-phosphorothioate linkage
  modified_base 22: mod_base = OTHER; note = 2'-O-methyl modified nucleotide with 3'-phosphorothioate linkage
  modified_base 23: mod_base = OTHER; note = 2'-O-methyl modified nucleotide
tgtacttgccacctatgagcttc

SEQ ID NO: 260 - RNA, 23 nt, synthetic construct
  source 1..23: mol_type = other RNA
  modified_base 1: mod_base = OTHER; note = 2'-O-methyl modified nucleotide with 3'-phosphorothioate linkage
  modified_base 2: mod_base = OTHER; note = 2'-fluoro modified nucleotide with 3'-phosphorothioate linkage
  modified_base 3: mod_base = OTHER; note = 2'-O-methyl modified nucleotide
  modified_base 4: mod_base = OTHER; note = 2'-O-methyl modified nucleotide
  modified_base 5: mod_base = OTHER; note = 2'-O-methyl modified nucleotide
  modified_base 6: mod_base = OTHER; note = 2'-fluoro modified nucleotide
  modified_base 7: mod_base = OTHER; note = 2'-O-methyl modified nucleotide
  modified_base 8: mod_base = OTHER; note = 2'-O-methyl modified nucleotide
  modified_base 9: mod_base = OTHER; note = 2'-O-methyl modified nucleotide
  modified_base 10: mod_base = OTHER; note = 2'-O-methyl modified nucleotide
  modified_base 11: mod_base = OTHER; note = 2'-O-methyl modified nucleotide
  modified_base 12: mod_base = OTHER; note = 2'-O-methyl modified nucleotide
  modified_base 13: mod_base = OTHER; note = 2'-O-methyl modified nucleotide
  modified_base 14: mod_base = OTHER; note = 2'-fluoro modified nucleotide
  modified_base 15: mod_base = OTHER; note = 2'-O-methyl modified nucleotide
  modified_base 16: mod_base = OTHER; note = 2'-fluoro modified nucleotide
  modified_base 17: mod_base = OTHER; note = 2'-O-methyl modified nucleotide
  modified_base 18: mod_base = OTHER; note = 2'-O-methyl modified nucleotide
  modified_base 19: mod_base = OTHER; note = 2'-O-methyl modified nucleotide
  modified_base 20: mod_base = OTHER; note = 2'-O-methyl modified nucleotide
  modified_base 21: mod_base = OTHER; note = 2'-O-methyl modified nucleotide with 3'-phosphorothioate linkage
  modified_base 22: mod_base = OTHER; note = 2'-O-methyl modified nucleotide with 3'-phosphorothioate linkage
  modified_base 23: mod_base = OTHER; note = 2'-O-methyl modified nucleotide
ccatgtacttgccacctatgagc

SEQ ID NO: 261 - RNA, 23 nt, synthetic construct
  source 1..23: mol_type = other RNA
  modified_base 1: mod_base = OTHER; note = 2'-O-methyl modified nucleotide with 3'-phosphorothioate linkage
  modified_base 2: mod_base = OTHER; note = 2'-fluoro modified nucleotide with 3'-phosphorothioate linkage
  modified_base 3: mod_base = OTHER; note = 2'-O-methyl modified nucleotide
  modified_base 4: mod_base = OTHER; note = 2'-O-methyl modified nucleotide
  modified_base 5: mod_base = OTHER; note = 2'-O-methyl modified nucleotide
  modified_base 6: mod_base = OTHER; note = 2'-fluoro modified nucleotide
  modified_base 7: mod_base = OTHER; note = 2'-O-methyl modified nucleotide
  modified_base 8: mod_base = OTHER; note = 2'-O-methyl modified nucleotide
  modified_base 9: mod_base = OTHER; note = 2'-O-methyl modified nucleotide
  modified_base 10: mod_base = OTHER; note = 2'-O-methyl modified nucleotide
  modified_base 11: mod_base = OTHER; note = 2'-O-methyl modified nucleotide
  modified_base 12: mod_base = OTHER; note = 2'-O-methyl modified nucleotide
  modified_base 13: mod_base = OTHER; note = 2'-O-methyl modified nucleotide
  modified_base 14: mod_base = OTHER; note = 2'-fluoro modified nucleotide
  modified_base 15: mod_base = OTHER; note = 2'-O-methyl modified nucleotide
  modified_base 16: mod_base = OTHER; note = 2'-fluoro modified nucleotide
  modified_base 17: mod_base = OTHER; note = 2'-O-methyl modified nucleotide
  modified_base 18: mod_base = OTHER; note = 2'-O-methyl modified nucleotide
  modified_base 19: mod_base = OTHER; note = 2'-O-methyl modified nucleotide
  modified_base 20: mod_base = OTHER; note = 2'-O-methyl modified nucleotide
  modified_base 21: mod_base = OTHER; note = 2'-O-methyl modified nucleotide with 3'-phosphorothioate linkage
  modified_base 22: mod_base = OTHER; note = 2'-O-methyl modified nucleotide with 3'-phosphorothioate linkage
  modified_base 23: mod_base = OTHER; note = 2'-O-methyl modified nucleotide
tcgcccatgtacttgccacctat

SEQ ID NO: 262 - RNA, 23 nt, synthetic construct
  source 1..23: mol_type = other RNA
  modified_base 1: mod_base = OTHER; note = 2'-O-methyl modified nucleotide with 3'-phosphorothioate linkage
  modified_base 2: mod_base = OTHER; note = 2'-fluoro modified nucleotide with 3'-phosphorothioate linkage
  modified_base 3: mod_base = OTHER; note = 2'-O-methyl modified nucleotide
  modified_base 4: mod_base = OTHER; note = 2'-O-methyl modified nucleotide
  modified_base 5: mod_base = OTHER; note = 2'-O-methyl modified nucleotide
  modified_base 6: mod_base = OTHER; note = 2'-fluoro modified nucleotide
  modified_base 7: mod_base = OTHER; note = 2'-O-methyl modified nucleotide
  modified_base 8: mod_base = OTHER; note = 2'-O-methyl modified nucleotide
  modified_base 9: mod_base = OTHER; note = 2'-O-methyl modified nucleotide
  modified_base 10: mod_base = OTHER; note = 2'-O-methyl modified nucleotide
  modified_base 11: mod_base = OTHER; note = 2'-O-methyl modified nucleotide
  modified_base 12: mod_base = OTHER; note = 2'-O-methyl modified nucleotide
  modified_base 13: mod_base = OTHER; note = 2'-O-methyl modified nucleotide
  modified_base 14: mod_base = OTHER; note = 2'-fluoro modified nucleotide
  modified_base 15: mod_base = OTHER; note = 2'-O-methyl modified nucleotide
  modified_base 16: mod_base = OTHER; note = 2'-fluoro modified nucleotide
  modified_base 17: mod_base = OTHER; note = 2'-O-methyl modified nucleotide
  modified_base 18: mod_base = OTHER; note = 2'-O-methyl modified nucleotide
  modified_base 19: mod_base = OTHER; note = 2'-O-methyl modified nucleotide
  modified_base 20: mod_base = OTHER; note = 2'-O-methyl modified nucleotide
  modified_base 21: mod_base = OTHER; note = 2'-O-methyl modified nucleotide with 3'-phosphorothioate linkage
  modified_base 22: mod_base = OTHER; note = 2'-O-methyl modified nucleotide with 3'-phosphorothioate linkage
  modified_base 23: mod_base = OTHER; note = 2'-O-methyl modified nucleotide
gctcgcccatgtacttgccacct

SEQ ID NO: 263 - RNA, 23 nt, synthetic construct
  source 1..23: mol_type = other RNA
  modified_base 1: mod_base = OTHER; note = 2'-O-methyl modified nucleotide with 3'-phosphorothioate linkage
  modified_base 2: mod_base = OTHER; note = 2'-fluoro modified nucleotide with 3'-phosphorothioate linkage
  modified_base 3: mod_base = OTHER; note = 2'-O-methyl modified nucleotide
  modified_base 4: mod_base = OTHER; note = 2'-O-methyl modified nucleotide
  modified_base 5: mod_base = OTHER; note = 2'-O-methyl modified nucleotide
  modified_base 6: mod_base = OTHER; note = 2'-fluoro modified nucleotide
  modified_base 7: mod_base = OTHER; note = 2'-O-methyl modified nucleotide
  modified_base 8: mod_base = OTHER; note = 2'-O-methyl modified nucleotide
  modified_base 9: mod_base = OTHER; note = 2'-O-methyl modified nucleotide
  modified_base 10: mod_base = OTHER; note = 2'-O-methyl modified nucleotide
  modified_base 11: mod_base = OTHER; note = 2'-O-methyl modified nucleotide
  modified_base 12: mod_base = OTHER; note = 2'-O-methyl modified nucleotide
  modified_base 13: mod_base = OTHER; note = 2'-O-methyl modified nucleotide
  modified_base 14: mod_base = OTHER; note = 2'-fluoro modified nucleotide
  modified_base 15: mod_base = OTHER; note = 2'-O-methyl modified nucleotide
  modified_base 16: mod_base = OTHER; note = 2'-fluoro modified nucleotide
  modified_base 17: mod_base = OTHER; note = 2'-O-methyl modified nucleotide
  modified_base 18: mod_base = OTHER; note = 2'-O-methyl modified nucleotide
  modified_base 19: mod_base = OTHER; note = 2'-O-methyl modified nucleotide
  modified_base 20: mod_base = OTHER; note = 2'-O-methyl modified nucleotide
  modified_base 21: mod_base = OTHER; note = 2'-O-methyl modified nucleotide with 3'-phosphorothioate linkage
  modified_base 22: mod_base = OTHER; note = 2'-O-methyl modified nucleotide with 3'-phosphorothioate linkage
  modified_base 23: mod_base = OTHER; note = 2'-O-methyl modified nucleotide
cagctcgcccatgtacttgccac

SEQ ID NO: 264 - RNA, 23 nt, synthetic construct
  source 1..23: mol_type = other RNA
  modified_base 1: mod_base = OTHER; note = 2'-O-methyl modified nucleotide with 3'-phosphorothioate linkage
  modified_base 2: mod_base = OTHER; note = 2'-fluoro modified nucleotide with 3'-phosphorothioate linkage
  modified_base 3: mod_base = OTHER; note = 2'-O-methyl modified nucleotide
  modified_base 4: mod_base = OTHER; note = 2'-O-methyl modified nucleotide
  modified_base 5: mod_base = OTHER; note = 2'-O-methyl modified nucleotide
  modified_base 6: mod_base = OTHER; note = 2'-fluoro modified nucleotide
  modified_base 7: mod_base = OTHER; note = 2'-O-methyl modified nucleotide
  modified_base 8: mod_base = OTHER; note = 2'-O-methyl modified nucleotide
  modified_base 9: mod_base = OTHER; note = 2'-O-methyl modified nucleotide
  modified_base 10: mod_base = OTHER; note = 2'-O-methyl modified nucleotide
  modified_base 11: mod_base = OTHER; note = 2'-O-methyl modified nucleotide
  modified_base 12: mod_base = OTHER; note = 2'-O-methyl modified nucleotide
  modified_base 13: mod_base = OTHER; note = 2'-O-methyl modified nucleotide
  modified_base 14: mod_base = OTHER; note = 2'-fluoro modified nucleotide
  modified_base 15: mod_base = OTHER; note = 2'-O-methyl modified nucleotide
  modified_base 16: mod_base = OTHER; note = 2'-fluoro modified nucleotide
  modified_base 17: mod_base = OTHER; note = 2'-O-methyl modified nucleotide
  modified_base 18: mod_base = OTHER; note = 2'-O-methyl modified nucleotide
  modified_base 19: mod_base = OTHER; note = 2'-O-methyl modified nucleotide
  modified_base 20: mod_base = OTHER; note = 2'-O-methyl modified nucleotide
  modified_base 21: mod_base = OTHER; note = 2'-O-methyl modified nucleotide with 3'-phosphorothioate linkage
  modified_base 22: mod_base = OTHER; note = 2'-O-methyl modified nucleotide with 3'-phosphorothioate linkage
  modified_base 23: mod_base = OTHER; note = 2'-O-methyl modified nucleotide
tcgtccacgagcctgagcagcac

SEQ ID NO: 265 - RNA, 23 nt, synthetic construct
  source 1..23: mol_type = other RNA
  modified_base 1: mod_base = OTHER; note = 2'-O-methyl modified nucleotide with 3'-phosphorothioate linkage
  modified_base 2: mod_base = OTHER; note = 2'-fluoro modified nucleotide with 3'-phosphorothioate linkage
  modified_base 3: mod_base = OTHER; note = 2'-O-methyl modified nucleotide
  modified_base 4: mod_base = OTHER; note = 2'-O-methyl modified nucleotide
  modified_base 5: mod_base = OTHER; note = 2'-O-methyl modified nucleotide
  modified_base 6: mod_base = OTHER; note = 2'-fluoro modified nucleotide
  modified_base 7: mod_base = OTHER; note = 2'-O-methyl modified nucleotide
  modified_base 8: mod_base = OTHER; note = 2'-O-methyl modified nucleotide
  modified_base 9: mod_base = OTHER; note = 2'-O-methyl modified nucleotide
  modified_base 10: mod_base = OTHER; note = 2'-O-methyl modified nucleotide
  modified_base 11: mod_base = OTHER; note = 2'-O-methyl modified nucleotide
  modified_base 12: mod_base = OTHER; note = 2'-O-methyl modified nucleotide
  modified_base 13: mod_base = OTHER; note = 2'-O-methyl modified nucleotide
  modified_base 14: mod_base = OTHER; note = 2'-fluoro modified nucleotide
  modified_base 15: mod_base = OTHER; note = 2'-O-methyl modified nucleotide
  modified_base 16: mod_base = OTHER; note = 2'-fluoro modified nucleotide
  modified_base 17: mod_base = OTHER; note = 2'-O-methyl modified nucleotide
  modified_base 18: mod_base = OTHER; note = 2'-O-methyl modified nucleotide
  modified_base 19: mod_base = OTHER; note = 2'-O-methyl modified nucleotide
  modified_base 20: mod_base = OTHER; note = 2'-O-methyl modified nucleotide
  modified_base 21: mod_base = OTHER; note = 2'-O-methyl modified nucleotide with 3'-phosphorothioate linkage
  modified_base 22: mod_base = OTHER; note = 2'-O-methyl modified nucleotide with 3'-phosphorothioate linkage
  modified_base 23: mod_base = OTHER; note = 2'-O-methyl modified nucleotide
ttcgtccacgagcctgagcagca

SEQ ID NO: 266 - RNA, 23 nt, synthetic construct
  source 1..23: mol_type = other RNA
  modified_base 1: mod_base = OTHER; note = 2'-O-methyl modified nucleotide with 3'-phosphorothioate linkage
  modified_base 2: mod_base = OTHER; note = 2'-fluoro modified nucleotide with 3'-phosphorothioate linkage
  modified_base 3: mod_base = OTHER; note = 2'-O-methyl modified nucleotide
  modified_base 4: mod_base = OTHER; note = 2'-O-methyl modified nucleotide
  modified_base 5: mod_base = OTHER; note = 2'-O-methyl modified nucleotide
  modified_base 6: mod_base = OTHER; note = 2'-fluoro modified nucleotide
  modified_base 7: mod_base = OTHER; note = 2'-O-methyl modified nucleotide
  modified_base 8: mod_base = OTHER; note = 2'-O-methyl modified nucleotide
  modified_base 9: mod_base = OTHER; note = 2'-O-methyl modified nucleotide
  modified_base 10: mod_base = OTHER; note = 2'-O-methyl modified nucleotide
  modified_base 11: mod_base = OTHER; note = 2'-O-methyl modified nucleotide
  modified_base 12: mod_base = OTHER; note = 2'-O-methyl modified nucleotide
  modified_base 13: mod_base = OTHER; note = 2'-O-methyl modified nucleotide
  modified_base 14: mod_base = OTHER; note = 2'-fluoro modified nucleotide
  modified_base 15: mod_base = OTHER; note = 2'-O-methyl modified nucleotide
  modified_base 16: mod_base = OTHER; note = 2'-fluoro modified nucleotide
  modified_base 17: mod_base = OTHER; note = 2'-O-methyl modified nucleotide
  modified_base 18: mod_base = OTHER; note = 2'-O-methyl modified nucleotide
  modified_base 19: mod_base = OTHER; note = 2'-O-methyl modified nucleotide
  modified_base 20: mod_base = OTHER; note = 2'-O-methyl modified nucleotide
  modified_base 21: mod_base = OTHER; note = 2'-O-methyl modified nucleotide with 3'-phosphorothioate linkage
  modified_base 22: mod_base = OTHER; note = 2'-O-methyl modified nucleotide with 3'-phosphorothioate linkage
  modified_base 23: mod_base = OTHER; note = 2'-O-methyl modified nucleotide
ttgtagatctgcttgcggtcgcc

SEQ ID NO: 267 - RNA, 23 nt, synthetic construct
  source 1..23: mol_type = other RNA
  modified_base 1: mod_base = OTHER; note = 2'-O-methyl modified nucleotide with 3'-phosphorothioate linkage
  modified_base 2: mod_base = OTHER; note = 2'-fluoro modified nucleotide with 3'-phosphorothioate linkage
  modified_base 3: mod_base = OTHER; note = 2'-O-methyl modified nucleotide
  modified_base 4: mod_base = OTHER; note = 2'-O-methyl modified nucleotide
  modified_base 5: mod_base = OTHER; note = 2'-O-methyl modified nucleotide
  modified_base 6: mod_base = OTHER; note = 2'-fluoro modified nucleotide
  modified_base 7: mod_base = OTHER; note = 2'-O-methyl modified nucleotide
  modified_base 8: mod_base = OTHER; note = 2'-O-methyl modified nucleotide
  modified_base 9: mod_base = OTHER; note = 2'-O-methyl modified nucleotide
  modified_base 10: mod_base = OTHER; note = 2'-O-methyl modified nucleotide
  modified_base 11: mod_base = OTHER; note = 2'-O-methyl modified nucleotide
  modified_base 12: mod_base = OTHER; note = 2'-O-methyl modified nucleotide
  modified_base 13: mod_base = OTHER; note = 2'-O-methyl modified nucleotide
  modified_base 14: mod_base = OTHER; note = 2'-fluoro modified nucleotide
  modified_base 15: mod_base = OTHER; note = 2'-O-methyl modified nucleotide
  modified_base 16: mod_base = OTHER; note = 2'-fluoro modified nucleotide
  modified_base 17: mod_base = OTHER; note = 2'-O-methyl modified nucleotide
  modified_base 18: mod_base = OTHER; note = 2'-O-methyl modified nucleotide
  modified_base 19: mod_base = OTHER; note = 2'-O-methyl modified nucleotide
  modified_base 20: mod_base = OTHER; note = 2'-O-methyl modified nucleotide
  modified_base 21: mod_base = OTHER; note = 2'-O-methyl modified nucleotide with 3'-phosphorothioate linkage
  modified_base 22: mod_base = OTHER; note = 2'-O-methyl modified nucleotide with 3'-phosphorothioate linkage
  modified_base 23: mod_base = OTHER; note = 2'-O-methyl modified nucleotide
tcaggatgttgtagatctgcttg

SEQ ID NO: 268 - RNA, 23 nt, synthetic construct
  source 1..23: mol_type = other RNA
  modified_base 1: mod_base = OTHER; note = 2'-O-methyl modified nucleotide with 3'-phosphorothioate linkage
  modified_base 2: mod_base = OTHER; note = 2'-fluoro modified nucleotide with 3'-phosphorothioate linkage
  modified_base 3: mod_base = OTHER; note = 2'-O-methyl modified nucleotide
  modified_base 4: mod_base = OTHER; note = 2'-O-methyl modified nucleotide
  modified_base 5: mod_base = OTHER; note = 2'-O-methyl modified nucleotide
  modified_base 6: mod_base = OTHER; note = 2'-fluoro modified nucleotide
  modified_base 7: mod_base = OTHER; note = 2'-O-methyl modified nucleotide
  modified_base 8: mod_base = OTHER; note = 2'-O-methyl modified nucleotide
  modified_base 9: mod_base = OTHER; note = 2'-O-methyl modified nucleotide
  modified_base 10: mod_base = OTHER; note = 2'-O-methyl modified nucleotide
  modified_base 11: mod_base = OTHER; note = 2'-O-methyl modified nucleotide
  modified_base 12: mod_base = OTHER; note = 2'-O-methyl modified nucleotide
  modified_base 13: mod_base = OTHER; note = 2'-O-methyl modified nucleotide
  modified_base 14: mod_base = OTHER; note = 2'-fluoro modified nucleotide
  modified_base 15: mod_base = OTHER; note = 2'-O-methyl modified nucleotide
  modified_base 16: mod_base = OTHER; note = 2'-fluoro modified nucleotide
  modified_base 17: mod_base = OTHER; note = 2'-O-methyl modified nucleotide
  modified_base 18: mod_base = OTHER; note = 2'-O-methyl modified nucleotide
  modified_base 19: mod_base = OTHER; note = 2'-O-methyl modified nucleotide
  modified_base 20: mod_base = OTHER; note = 2'-O-methyl modified nucleotide
  modified_base 21: mod_base = OTHER; note = 2'-O-methyl modified nucleotide with 3'-phosphorothioate linkage
  modified_base 22: mod_base = OTHER; note = 2'-O-methyl modified nucleotide with 3'-phosphorothioate linkage
  modified_base 23: mod_base = OTHER; note = 2'-O-methyl modified nucleotide
cgtgctcaggatgttgtagatct

SEQ ID NO: 269 - RNA, 23 nt, synthetic construct
  source 1..23: mol_type = other RNA
  modified_base 1: mod_base = OTHER; note = 2'-O-methyl modified nucleotide with 3'-phosphorothioate linkage
  modified_base 2: mod_base = OTHER; note = 2'-fluoro modified nucleotide with 3'-phosphorothioate linkage
  modified_base 3: mod_base = OTHER; note = 2'-O-methyl modified nucleotide
  modified_base 4: mod_base = OTHER; note = 2'-O-methyl modified nucleotide
  modified_base 5: mod_base = OTHER; note = 2'-O-methyl modified nucleotide
  modified_base 6: mod_base = OTHER; note = 2'-fluoro modified nucleotide
  modified_base 7: mod_base = OTHER; note = 2'-O-methyl modified nucleotide
  modified_base 8: mod_base = OTHER; note = 2'-O-methyl modified nucleotide
  modified_base 9: mod_base = OTHER; note = 2'-O-methyl modified nucleotide
  modified_base 10: mod_base = OTHER; note = 2'-O-methyl modified nucleotide
  modified_base 11: mod_base = OTHER; note = 2'-O-methyl modified nucleotide
  modified_base 12: mod_base = OTHER; note = 2'-O-methyl modified nucleotide
  modified_base 13: mod_base = OTHER; note = 2'-O-methyl modified nucleotide
  modified_base 14: mod_base = OTHER; note = 2'-fluoro modified nucleotide
  modified_base 15: mod_base = OTHER; note = 2'-O-methyl modified nucleotide
  modified_base 16: mod_base = OTHER; note = 2'-fluoro modified nucleotide
  modified_base 17: mod_base = OTHER; note = 2'-O-methyl modified nucleotide
  modified_base 18: mod_base = OTHER; note = 2'-O-methyl modified nucleotide
  modified_base 19: mod_base = OTHER; note = 2'-O-methyl modified nucleotide
  modified_base 20: mod_base = OTHER; note = 2'-O-methyl modified nucleotide
  modified_base 21: mod_base = OTHER; note = 2'-O-methyl modified nucleotide with 3'-phosphorothioate linkage
  modified_base 22: mod_base = OTHER; note = 2'-O-methyl modified nucleotide with 3'-phosphorothioate linkage
  modified_base 23: mod_base = OTHER; note = 2'-O-methyl modified nucleotide
agcgtgctcaggatgttgtagat

SEQ ID NO: 270 - RNA, 23 nt, synthetic construct
  source 1..23: mol_type = other RNA
  modified_base 1: mod_base = OTHER; note = 2'-O-methyl modified nucleotide with 3'-phosphorothioate linkage
  modified_base 2: mod_base = OTHER; note = 2'-fluoro modified nucleotide with 3'-phosphorothioate linkage
  modified_base 3: mod_base = OTHER; note = 2'-O-methyl modified nucleotide
  modified_base 4: mod_base = OTHER; note = 2'-O-methyl modified nucleotide
  modified_base 5: mod_base = OTHER; note = 2'-O-methyl modified nucleotide
  modified_base 6: mod_base = OTHER; note = 2'-fluoro modified nucleotide
  modified_base 7: mod_base = OTHER; note = 2'-O-methyl modified nucleotide
  modified_base 8: mod_base = OTHER; note = 2'-O-methyl modified nucleotide
  modified_base 9: mod_base = OTHER; note = 2'-O-methyl modified nucleotide
  modified_base 10: mod_base = OTHER; note = 2'-O-methyl modified nucleotide
  modified_base 11: mod_base = OTHER; note = 2'-O-methyl modified nucleotide
  modified_base 12: mod_base = OTHER; note = 2'-O-methyl modified nucleotide
  modified_base 13: mod_base = OTHER; note = 2'-O-methyl modified nucleotide
  modified_base 14: mod_base = OTHER; note = 2'-fluoro modified nucleotide
  modified_base 15: mod_base = OTHER; note = 2'-O-methyl modified nucleotide
  modified_base 16: mod_base = OTHER; note = 2'-fluoro modified nucleotide
  modified_base 17: mod_base = OTHER; note = 2'-O-methyl modified nucleotide
  modified_base 18: mod_base = OTHER; note = 2'-O-methyl modified nucleotide
  modified_base 19: mod_base = OTHER; note = 2'-O-methyl modified nucleotide
  modified_base 20: mod_base = OTHER; note = 2'-O-methyl modified nucleotide
  modified_base 21: mod_base = OTHER; note = 2'-O-methyl modified nucleotide with 3'-phosphorothioate linkage
  modified_base 22: mod_base = OTHER; note = 2'-O-methyl modified nucleotide with 3'-phosphorothioate linkage
  modified_base 23: mod_base = OTHER; note = 2'-O-methyl modified nucleotide
cacgcccacagtgatgcgcatta

SEQ ID NO: 271 - RNA, 23 nt, synthetic construct
  source 1..23: mol_type = other RNA
  modified_base 1: mod_base = OTHER; note = 2'-O-methyl modified nucleotide with 3'-phosphorothioate linkage
  modified_base 2: mod_base = OTHER; note = 2'-fluoro modified nucleotide with 3'-phosphorothioate linkage
  modified_base 3: mod_base = OTHER; note = 2'-O-methyl modified nucleotide
  modified_base 4: mod_base = OTHER; note = 2'-O-methyl modified nucleotide
  modified_base 5: mod_base = OTHER; note = 2'-O-methyl modified nucleotide
  modified_base 6: mod_base = OTHER; note = 2'-fluoro modified nucleotide
  modified_base 7: mod_base = OTHER; note = 2'-O-methyl modified nucleotide
  modified_base 8: mod_base = OTHER; note = 2'-O-methyl modified nucleotide
  modified_base 9: mod_base = OTHER; note = 2'-O-methyl modified nucleotide
  modified_base 10: mod_base = OTHER; note = 2'-O-methyl modified nucleotide
  modified_base 11: mod_base = OTHER; note = 2'-O-methyl modified nucleotide
  modified_base 12: mod_base = OTHER; note = 2'-O-methyl modified nucleotide
  modified_base 13: mod_base = OTHER; note = 2'-O-methyl modified nucleotide
  modified_base 14: mod_base = OTHER; note = 2'-fluoro modified nucleotide
  modified_base 15: mod_base = OTHER; note = 2'-O-methyl modified nucleotide
  modified_base 16: mod_base = OTHER; note = 2'-fluoro modified nucleotide
  modified_base 17: mod_base = OTHER; note = 2'-O-methyl modified nucleotide
  modified_base 18: mod_base = OTHER; note = 2'-O-methyl modified nucleotide
  modified_base 19: mod_base = OTHER; note = 2'-O-methyl modified nucleotide
  modified_base 20: mod_base = OTHER; note = 2'-O-methyl modified nucleotide
  modified_base 21: mod_base = OTHER; note = 2'-O-methyl modified nucleotide with 3'-phosphorothioate linkage
  modified_base 22: mod_base = OTHER; note = 2'-O-methyl modified nucleotide with 3'-phosphorothioate linkage
  modified_base 23: mod_base = OTHER; note = 2'-O-methyl modified nucleotide
agccatccacgcccacagtgatg

SEQ ID NO: 272 - RNA, 23 nt, synthetic construct
  source 1..23: mol_type = other RNA
  modified_base 1: mod_base = OTHER; note = 2'-O-methyl modified nucleotide with 3'-phosphorothioate linkage
  modified_base 2: mod_base = OTHER; note = 2'-fluoro modified nucleotide with 3'-phosphorothioate linkage
  modified_base 3: mod_base = OTHER; note = 2'-O-methyl modified nucleotide
  modified_base 4: mod_base = OTHER; note = 2'-O-methyl modified nucleotide
  modified_base 5: mod_base = OTHER; note = 2'-O-methyl modified nucleotide
  modified_base 6: mod_base = OTHER; note = 2'-fluoro modified nucleotide
  modified_base 7: mod_base = OTHER; note = 2'-O-methyl modified nucleotide
  modified_base 8: mod_base = OTHER; note = 2'-O-methyl modified nucleotide
  modified_base 9: mod_base = OTHER; note = 2'-O-methyl modified nucleotide
  modified_base 10: mod_base = OTHER; note = 2'-O-methyl modified nucleotide
  modified_base 11: mod_base = OTHER; note = 2'-O-methyl modified nucleotide
  modified_base 12: mod_base = OTHER; note = 2'-O-methyl modified nucleotide
  modified_base 13: mod_base = OTHER; note = 2'-O-methyl modified nucleotide
  modified_base 14: mod_base = OTHER; note = 2'-fluoro modified nucleotide
  modified_base 15: mod_base = OTHER; note = 2'-O-methyl modified nucleotide
  modified_base 16: mod_base = OTHER; note = 2'-fluoro modified nucleotide
  modified_base 17: mod_base = OTHER; note = 2'-O-methyl modified nucleotide
  modified_base 18: mod_base = OTHER; note = 2'-O-methyl modified nucleotide
  modified_base 19: mod_base = OTHER; note = 2'-O-methyl modified nucleotide
  modified_base 20: mod_base = OTHER; note = 2'-O-methyl modified nucleotide
  modified_base 21: mod_base = OTHER; note = 2'-O-methyl modified nucleotide with 3'-phosphorothioate linkage
  modified_base 22: mod_base = OTHER; note = 2'-O-methyl modified nucleotide with 3'-phosphorothioate linkage
  modified_base 23: mod_base = OTHER; note = 2'-O-methyl modified nucleotide
gagccatccacgcccacagtgat

SEQ ID NO: 273 - RNA, 23 nt, synthetic construct
  source 1..23: mol_type = other RNA
  modified_base 1: mod_base = OTHER; note = 2'-O-methyl modified nucleotide with 3'-phosphorothioate linkage
  modified_base 2: mod_base = OTHER; note = 2'-fluoro modified nucleotide with 3'-phosphorothioate linkage
  modified_base 3: mod_base = OTHER; note = 2'-O-methyl modified nucleotide
  modified_base 4: mod_base = OTHER; note = 2'-O-methyl modified nucleotide
  modified_base 5: mod_base = OTHER; note = 2'-O-methyl modified nucleotide
  modified_base 6: mod_base = OTHER; note = 2'-fluoro modified nucleotide
  modified_base 7: mod_base = OTHER; note = 2'-O-methyl modified nucleotide
  modified_base 8: mod_base = OTHER; note = 2'-O-methyl modified nucleotide
  modified_base 9: mod_base = OTHER; note = 2'-O-methyl modified nucleotide
  modified_base 10: mod_base = OTHER; note = 2'-O-methyl modified nucleotide
  modified_base 11: mod_base = OTHER; note = 2'-O-methyl modified nucleotide
  modified_base 12: mod_base = OTHER; note = 2'-O-methyl modified nucleotide
  modified_base 13: mod_base = OTHER; note = 2'-O-methyl modified nucleotide
  modified_base 14: mod_base = OTHER; note = 2'-fluoro modified nucleotide
  modified_base 15: mod_base = OTHER; note = 2'-O-methyl modified nucleotide
  modified_base 16: mod_base = OTHER; note = 2'-fluoro modified nucleotide
  modified_base 17: mod_base = OTHER; note = 2'-O-methyl modified nucleotide
  modified_base 18: mod_base = OTHER; note = 2'-O-methyl modified nucleotide
  modified_base 19: mod_base = OTHER; note = 2'-O-methyl modified nucleotide
  modified_base 20: mod_base = OTHER; note = 2'-O-methyl modified nucleotide
  modified_base 21: mod_base = OTHER; note = 2'-O-methyl modified nucleotide with 3'-phosphorothioate linkage
  modified_base 22: mod_base = OTHER; note = 2'-O-methyl modified nucleotide with 3'-phosphorothioate linkage
  modified_base 23: mod_base = OTHER; note = 2'-O-methyl modified nucleotide
ggagccatccacgcccacagtga

SEQ ID NO: 274 - RNA, 23 nt, synthetic construct
  source 1..23: mol_type = other RNA
  modified_base 1: mod_base = OTHER; note = 2'-O-methyl modified nucleotide with 3'-phosphorothioate linkage
  modified_base 2: mod_base = OTHER; note = 2'-fluoro modified nucleotide with 3'-phosphorothioate linkage
  modified_base 3: mod_base = OTHER; note = 2'-O-methyl modified nucleotide
  modified_base 4: mod_base = OTHER; note = 2'-O-methyl modified nucleotide
  modified_base 5: mod_base = OTHER; note = 2'-O-methyl modified nucleotide
  modified_base 6: mod_base = OTHER; note = 2'-fluoro modified nucleotide
  modified_base 7: mod_base = OTHER; note = 2'-O-methyl modified nucleotide
  modified_base 8: mod_base = OTHER; note = 2'-O-methyl modified nucleotide
  modified_base 9: mod_base = OTHER; note = 2'-O-methyl modified nucleotide
  modified_base 10: mod_base = OTHER; note = 2'-O-methyl modified nucleotide
  modified_base 11: mod_base = OTHER; note = 2'-O-methyl modified nucleotide
  modified_base 12: mod_base = OTHER; note = 2'-O-methyl modified nucleotide
  modified_base 13: mod_base = OTHER; note = 2'-O-methyl modified nucleotide
  modified_base 14: mod_base = OTHER; note = 2'-fluoro modified nucleotide
  modified_base 15: mod_base = OTHER; note = 2'-O-methyl modified nucleotide
  modified_base 16: mod_base = OTHER; note = 2'-fluoro modified nucleotide
  modified_base 17: mod_base = OTHER; note = 2'-O-methyl modified nucleotide
  modified_base 18: mod_base = OTHER; note = 2'-O-methyl modified nucleotide
  modified_base 19: mod_base = OTHER; note = 2'-O-methyl modified nucleotide
  modified_base 20: mod_base = OTHER; note = 2'-O-methyl modified nucleotide
  modified_base 21: mod_base = OTHER; note = 2'-O-methyl modified nucleotide with 3'-phosphorothioate linkage
  modified_base 22: mod_base = OTHER; note = 2'-O-methyl modified nucleotide with 3'-phosphorothioate linkage
  modified_base 23: mod_base = OTHER; note = 2'-O-methyl modified nucleotide
acacggagccatccacgcccaca

SEQ ID NO: 275 - RNA, 23 nt, synthetic construct
  source 1..23: mol_type = other RNA
  modified_base 1: mod_base = OTHER; note = 2'-O-methyl modified nucleotide with 3'-phosphorothioate linkage
  modified_base 2: mod_base = OTHER; note = 2'-fluoro modified nucleotide with 3'-phosphorothioate linkage
  modified_base 3: mod_base = OTHER; note = 2'-O-methyl modified nucleotide
  modified_base 4: mod_base = OTHER; note = 2'-O-methyl modified nucleotide
  modified_base 5: mod_base = OTHER; note = 2'-O-methyl modified nucleotide
  modified_base 6: mod_base = OTHER; note = 2'-fluoro modified nucleotide
  modified_base 7: mod_base = OTHER; note = 2'-O-methyl modified nucleotide
  modified_base 8: mod_base = OTHER; note = 2'-O-methyl modified nucleotide
  modified_base 9: mod_base = OTHER; note = 2'-O-methyl modified nucleotide
  modified_base 10: mod_base = OTHER; note = 2'-O-methyl modified nucleotide
  modified_base 11: mod_base = OTHER; note = 2'-O-methyl modified nucleotide
  modified_base 12: mod_base = OTHER; note = 2'-O-methyl modified nucleotide
  modified_base 13: mod_base = OTHER; note = 2'-O-methyl modified nucleotide
  modified_base 14: mod_base = OTHER; note = 2'-fluoro modified nucleotide
  modified_base 15: mod_base = OTHER; note = 2'-O-methyl modified nucleotide
  modified_base 16: mod_base = OTHER; note = 2'-fluoro modified nucleotide
  modified_base 17: mod_base = OTHER; note = 2'-O-methyl modified nucleotide
  modified_base 18: mod_base = OTHER; note = 2'-O-methyl modified nucleotide
  modified_base 19: mod_base = OTHER; note = 2'-O-methyl modified nucleotide
  modified_base 20: mod_base = OTHER; note = 2'-O-methyl modified nucleotide
  modified_base 21: mod_base = OTHER; note = 2'-O-methyl modified nucleotide with 3'-phosphorothioate linkage
  modified_base 22: mod_base = OTHER; note = 2'-O-methyl modified nucleotide with 3'-phosphorothioate linkage
  modified_base 23: mod_base = OTHER; note = 2'-O-methyl modified nucleotide
gtacacggagccatccacgccca

SEQ ID NO: 276 - RNA, 23 nt, synthetic construct
  source 1..23: mol_type = other RNA
  modified_base 1: mod_base = OTHER; note = 2'-O-methyl modified nucleotide with 3'-phosphorothioate linkage
  modified_base 2: mod_base = OTHER; note = 2'-fluoro modified nucleotide with 3'-phosphorothioate linkage
  modified_base 3: mod_base = OTHER; note = 2'-O-methyl modified nucleotide
  modified_base 4: mod_base = OTHER; note = 2'-O-methyl modified nucleotide
  modified_base 5: mod_base = OTHER; note = 2'-O-methyl modified nucleotide
  modified_base 6: mod_base = OTHER; note = 2'-fluoro modified nucleotide
  modified_base 7: mod_base = OTHER; note = 2'-O-methyl modified nucleotide
  modified_base 8: mod_base = OTHER; note = 2'-O-methyl modified nucleotide
  modified_base 9: mod_base = OTHER; note = 2'-O-methyl modified nucleotide
  modified_base 10: mod_base = OTHER; note = 2'-O-methyl modified nucleotide
  modified_base 11: mod_base = OTHER; note = 2'-O-methyl modified nucleotide
  modified_base 12: mod_base = OTHER; note = 2'-O-methyl modified nucleotide
  modified_base 13: mod_base = OTHER; note = 2'-O-methyl modified nucleotide
  modified_base 14: mod_base = OTHER; note = 2'-fluoro modified nucleotide
  modified_base 15: mod_base = OTHER; note = 2'-O-methyl modified nucleotide
  modified_base 16: mod_base = OTHER; note = 2'-fluoro modified nucleotide
  modified_base 17: mod_base = OTHER; note = 2'-O-methyl modified nucleotide
  modified_base 18: mod_base = OTHER; note = 2'-O-methyl modified nucleotide
  modified_base 19: mod_base = OTHER; note = 2'-O-methyl modified nucleotide
  modified_base 20: mod_base = OTHER; note = 2'-O-methyl modified nucleotide
  modified_base 21: mod_base = OTHER; note = 2'-O-methyl modified nucleotide with 3'-phosphorothioate linkage
  modified_base 22: mod_base = OTHER; note = 2'-O-methyl modified nucleotide with 3'-phosphorothioate linkage
  modified_base 23: mod_base = OTHER; note = 2'-O-methyl modified nucleotide
tgtacacggagccatccacgccc

SEQ ID NO: 277 - RNA, 23 nt, synthetic construct
  source 1..23: mol_type = other RNA
  modified_base 1: mod_base = OTHER; note = 2'-O-methyl modified nucleotide with 3'-phosphorothioate linkage
  modified_base 2: mod_base = OTHER; note = 2'-fluoro modified nucleotide with 3'-phosphorothioate linkage
  modified_base 3: mod_base = OTHER; note = 2'-O-methyl modified nucleotide
  modified_base 4: mod_base = OTHER; note = 2'-O-methyl modified nucleotide
  modified_base 5: mod_base = OTHER; note = 2'-O-methyl modified nucleotide
  modified_base 6: mod_base = OTHER; note = 2'-fluoro modified nucleotide
  modified_base 7: mod_base = OTHER; note = 2'-O-methyl modified nucleotide
  modified_base 8: mod_base = OTHER; note = 2'-O-methyl modified nucleotide
  modified_base 9: mod_base = OTHER; note = 2'-O-methyl modified nucleotide
  modified_base 10: mod_base = OTHER; note = 2'-O-methyl modified nucleotide
  modified_base 11: mod_base = OTHER; note = 2'-O-methyl modified nucleotide
  modified_base 12: mod_base = OTHER; note = 2'-O-methyl modified nucleotide
  modified_base 13: mod_base = OTHER; note = 2'-O-methyl modified nucleotide
  modified_base 14: mod_base = OTHER; note = 2'-fluoro modified nucleotide
  modified_base 15: mod_base = OTHER; note = 2'-O-methyl modified nucleotide
  modified_base 16: mod_base = OTHER; note = 2'-fluoro modified nucleotide
  modified_base 17: mod_base = OTHER; note = 2'-O-methyl modified nucleotide
  modified_base 18: mod_base = OTHER; note = 2'-O-methyl modified nucleotide
  modified_base 19: mod_base = OTHER; note = 2'-O-methyl modified nucleotide
  modified_base 20: mod_base = OTHER; note = 2'-O-methyl modified nucleotide
  modified_base 21: mod_base = OTHER; note = 2'-O-methyl modified nucleotide with 3'-phosphorothioate linkage
  modified_base 22: mod_base = OTHER; note = 2'-O-methyl modified nucleotide with 3'-phosphorothioate linkage
  modified_base 23: mod_base = OTHER; note = 2'-O-methyl modified nucleotide
agcttgtacacggagccatccac

SEQ ID NO: 278 - RNA, 23 nt, synthetic construct
  source 1..23: mol_type = other RNA
  modified_base 1: mod_base = OTHER; note = 2'-O-methyl modified nucleotide with 3'-phosphorothioate linkage
  modified_base 2: mod_base = OTHER; note = 2'-fluoro modified nucleotide with 3'-phosphorothioate linkage
  modified_base 3: mod_base = OTHER; note = 2'-O-methyl modified nucleotide
  modified_base 4: mod_base = OTHER; note = 2'-O-methyl modified nucleotide
  modified_base 5: mod_base = OTHER; note = 2'-O-methyl modified nucleotide
  modified_base 6: mod_base = OTHER; note = 2'-fluoro modified nucleotide
  modified_base 7: mod_base = OTHER; note = 2'-O-methyl modified nucleotide
  modified_base 8: mod_base = OTHER; note = 2'-O-methyl modified nucleotide
  modified_base 9: mod_base = OTHER; note = 2'-O-methyl modified nucleotide
  modified_base 10: mod_base = OTHER; note = 2'-O-methyl modified nucleotide
  modified_base 11: mod_base = OTHER; note = 2'-O-methyl modified nucleotide
  modified_base 12: mod_base = OTHER; note = 2'-O-methyl modified nucleotide
  modified_base 13: mod_base = OTHER; note = 2'-O-methyl modified nucleotide
  modified_base 14: mod_base = OTHER; note = 2'-fluoro modified nucleotide
  modified_base 15: mod_base = OTHER; note = 2'-O-methyl modified nucleotide
  modified_base 16: mod_base = OTHER; note = 2'-fluoro modified nucleotide
  modified_base 17: mod_base = OTHER; note = 2'-O-methyl modified nucleotide
  modified_base 18: mod_base = OTHER; note = 2'-O-methyl modified nucleotide
  modified_base 19: mod_base = OTHER; note = 2'-O-methyl modified nucleotide
  modified_base 20: mod_base = OTHER; note = 2'-O-methyl modified nucleotide
  modified_base 21: mod_base = OTHER; note = 2'-O-methyl modified nucleotide with 3'-phosphorothioate linkage
  modified_base 22: mod_base = OTHER; note = 2'-O-methyl modified nucleotide with 3'-phosphorothioate linkage
  modified_base 23: mod_base = OTHER; note = 2'-O-methyl modified nucleotide
gtgatctcgcagctgggcgtcag

SEQ ID NO: 279 - RNA, 23 nt, synthetic construct
  source 1..23: mol_type = other RNA
  modified_base 1: mod_base = OTHER; note = 2'-O-methyl modified nucleotide with 3'-phosphorothioate linkage
  modified_base 2: mod_base = OTHER; note = 2'-fluoro modified nucleotide with 3'-phosphorothioate linkage
  modified_base 3: mod_base = OTHER; note = 2'-O-methyl modified nucleotide
  modified_base 4: mod_base = OTHER; note = 2'-O-methyl modified nucleotide
  modified_base 5: mod_base = OTHER; note = 2'-O-methyl modified nucleotide
  modified_base 6: mod_base = OTHER; note = 2'-fluoro modified nucleotide
  modified_base 7: mod_base = OTHER; note = 2'-O-methyl modified nucleotide
  modified_base 8: mod_base = OTHER; note = 2'-O-methyl modified nucleotide
  modified_base 9: mod_base = OTHER; note = 2'-O-methyl modified nucleotide
  modified_base 10: mod_base = OTHER; note = 2'-O-methyl modified nucleotide
  modified_base 11: mod_base = OTHER; note = 2'-O-methyl modified nucleotide
  modified_base 12: mod_base = OTHER; note = 2'-O-methyl modified nucleotide
  modified_base 13: mod_base = OTHER; note = 2'-O-methyl modified nucleotide
  modified_base 14: mod_base = OTHER; note = 2'-fluoro modified nucleotide
  modified_base 15: mod_base = OTHER; note = 2'-O-methyl modified nucleotide
  modified_base 16: mod_base = OTHER; note = 2'-fluoro modified nucleotide
  modified_base 17: mod_base = OTHER; note = 2'-O-methyl modified nucleotide
  modified_base 18: mod_base = OTHER; note = 2'-O-methyl modified nucleotide
  modified_base 19: mod_base = OTHER; note = 2'-O-methyl modified nucleotide
  modified_base 20: mod_base = OTHER; note = 2'-O-methyl modified nucleotide
  modified_base 21: mod_base = OTHER; note = 2'-O-methyl modified nucleotide with 3'-phosphorothioate linkage
  modified_base 22: mod_base = OTHER; note = 2'-O-methyl modified nucleotide with 3'-phosphorothioate linkage
  modified_base 23: mod_base = OTHER; note = 2'-O-methyl modified nucleotide
gactcgatgaaggtgatctcgca

SEQ ID NO: 280 - RNA, 23 nt, synthetic construct
  source 1..23: mol_type = other RNA
  modified_base 1: mod_base = OTHER; note = 2'-O-methyl modified nucleotide with 3'-phosphorothioate linkage
  modified_base 2: mod_base = OTHER; note = 2'-fluoro modified nucleotide with 3'-phosphorothioate linkage
  modified_base 3: mod_base = OTHER; note = 2'-O-methyl modified nucleotide
  modified_base 4: mod_base = OTHER; note = 2'-O-methyl modified nucleotide
  modified_base 5: mod_base = OTHER; note = 2'-O-methyl modified nucleotide
  modified_base 6: mod_base = OTHER; note = 2'-fluoro modified nucleotide
  modified_base 7: mod_base = OTHER; note = 2'-O-methyl modified nucleotide
  modified_base 8: mod_base = OTHER; note = 2'-O-methyl modified nucleotide
  modified_base 9: mod_base = OTHER; note = 2'-O-methyl modified nucleotide
  modified_base 10: mod_base = OTHER; note = 2'-O-methyl modified nucleotide
  modified_base 11: mod_base = OTHER; note = 2'-O-methyl modified nucleotide
  modified_base 12: mod_base = OTHER; note = 2'-O-methyl modified nucleotide
  modified_base 13: mod_base = OTHER; note = 2'-O-methyl modified nucleotide
  modified_base 14: mod_base = OTHER; note = 2'-fluoro modified nucleotide
  modified_base 15: mod_base = OTHER; note = 2'-O-methyl modified nucleotide
  modified_base 16: mod_base = OTHER; note = 2'-fluoro modified nucleotide
  modified_base 17: mod_base = OTHER; note = 2'-O-methyl modified nucleotide
  modified_base 18: mod_base = OTHER; note = 2'-O-methyl modified nucleotide
  modified_base 19: mod_base = OTHER; note = 2'-O-methyl modified nucleotide
  modified_base 20: mod_base = OTHER; note = 2'-O-methyl modified nucleotide
  modified_base 21: mod_base = OTHER; note = 2'-O-methyl modified nucleotide with 3'-phosphorothioate linkage
  modified_base 22: mod_base = OTHER; note = 2'-O-methyl modified nucleotide with 3'-phosphorothioate linkage
  modified_base 23: mod_base = OTHER; note = 2'-O-methyl modified nucleotide
tccgactcgatgaaggtgatctc

SEQ ID NO: 281 - RNA, 23 nt, synthetic construct
  source 1..23: mol_type = other RNA
  modified_base 1: mod_base = OTHER; note = 2'-O-methyl modified nucleotide with 3'-phosphorothioate linkage
  modified_base 2: mod_base = OTHER; note = 2'-fluoro modified nucleotide with 3'-phosphorothioate linkage
  modified_base 3: mod_base = OTHER; note = 2'-O-methyl modified nucleotide
  modified_base 4: mod_base = OTHER; note = 2'-O-methyl modified nucleotide
  modified_base 5: mod_base = OTHER; note = 2'-O-methyl modified nucleotide
  modified_base 6: mod_base = OTHER; note = 2'-fluoro modified nucleotide
  modified_base 7: mod_base = OTHER; note = 2'-O-methyl modified nucleotide
  modified_base 8: mod_base = OTHER; note = 2'-O-methyl modified nucleotide
  modified_base 9: mod_base = OTHER; note = 2'-O-methyl modified nucleotide
  modified_base 10: mod_base = OTHER; note = 2'-O-methyl modified nucleotide
  modified_base 11: mod_base = OTHER; note = 2'-O-methyl modified nucleotide
  modified_base 12: mod_base = OTHER; note = 2'-O-methyl modified nucleotide
  modified_base 13: mod_base = OTHER; note = 2'-O-methyl modified nucleotide
  modified_base 14: mod_base = OTHER; note = 2'-fluoro modified nucleotide
  modified_base 15: mod_base = OTHER; note = 2'-O-methyl modified nucleotide
  modified_base 16: mod_base = OTHER; note = 2'-fluoro modified nucleotide
  modified_base 17: mod_base = OTHER; note = 2'-O-methyl modified nucleotide
  modified_base 18: mod_base = OTHER; note = 2'-O-methyl modified nucleotide
  modified_base 19: mod_base = OTHER; note = 2'-O-methyl modified nucleotide
  modified_base 20: mod_base = OTHER; note = 2'-O-methyl modified nucleotide
  modified_base 21: mod_base = OTHER; note = 2'-O-methyl modified nucleotide with 3'-phosphorothioate linkage
  modified_base 22: mod_base = OTHER; note = 2'-O-methyl modified nucleotide with 3'-phosphorothioate linkage
  modified_base 23: mod_base = OTHER; note = 2'-O-methyl modified nucleotide
ctccgactcgatgaaggtgatct

SEQ ID NO: 282 - RNA, 23 nt, synthetic construct
  source 1..23: mol_type = other RNA
  modified_base 1: mod_base = OTHER; note = 2'-O-methyl modified nucleotide with 3'-phosphorothioate linkage
  modified_base 2: mod_base = OTHER; note = 2'-fluoro modified nucleotide with 3'-phosphorothioate linkage
  modified_base 3: mod_base = OTHER; note = 2'-O-methyl modified nucleotide
  modified_base 4: mod_base = OTHER; note = 2'-O-methyl modified nucleotide
  modified_base 5: mod_base = OTHER; note = 2'-O-methyl modified nucleotide
  modified_base 6: mod_base = OTHER; note = 2'-fluoro modified nucleotide
  modified_base 7: mod_base = OTHER; note = 2'-O-methyl modified nucleotide
  modified_base 8: mod_base = OTHER; note = 2'-O-methyl modified nucleotide
  modified_base 9: mod_base = OTHER; note = 2'-O-methyl modified nucleotide
  modified_base 10: mod_base = OTHER; note = 2'-O-methyl modified nucleotide
  modified_base 11: mod_base = OTHER; note = 2'-O-methyl modified nucleotide
  modified_base 12: mod_base = OTHER; note = 2'-O-methyl modified nucleotide
  modified_base 13: mod_base = OTHER; note = 2'-O-methyl modified nucleotide
  modified_base 14: mod_base = OTHER; note = 2'-fluoro modified nucleotide
  modified_base 15: mod_base = OTHER; note = 2'-O-methyl modified nucleotide
  modified_base 16: mod_base = OTHER; note = 2'-fluoro modified nucleotide
  modified_base 17: mod_base = OTHER; note = 2'-O-methyl modified nucleotide
  modified_base 18: mod_base = OTHER; note = 2'-O-methyl modified nucleotide
  modified_base 19: mod_base = OTHER; note = 2'-O-methyl modified nucleotide
  modified_base 20: mod_base = OTHER; note = 2'-O-methyl modified nucleotide
  modified_base 21: mod_base = OTHER; note = 2'-O-methyl modified nucleotide with 3'-phosphorothioate linkage
  modified_base 22: mod_base = OTHER; note = 2'-O-methyl modified nucleotide with 3'-phosphorothioate linkage
  modified_base 23: mod_base = OTHER; note = 2'-O-methyl modified nucleotide
ctgacagtgtggaaatgcatcaa

SEQ ID NO: 283 - RNA, 23 nt, synthetic construct
  source 1..23: mol_type = other RNA
  modified_base 1: mod_base = OTHER; note = 2'-O-methyl modified nucleotide with 3'-phosphorothioate linkage
  modified_base 2: mod_base = OTHER; note = 2'-fluoro modified nucleotide with 3'-phosphorothioate linkage
  modified_base 3: mod_base = OTHER; note = 2'-O-methyl modified nucleotide
  modified_base 4: mod_base = OTHER; note = 2'-O-methyl modified nucleotide
  modified_base 5: mod_base = OTHER; note = 2'-O-methyl modified nucleotide
  modified_base 6: mod_base = OTHER; note = 2'-fluoro modified nucleotide
  modified_base 7: mod_base = OTHER; note = 2'-O-methyl modified nucleotide
  modified_base 8: mod_base = OTHER; note = 2'-O-methyl modified nucleotide
  modified_base 9: mod_base = OTHER; note = 2'-O-methyl modified nucleotide
  modified_base 10: mod_base = OTHER; note = 2'-O-methyl modified nucleotide
  modified_base 11: mod_base = OTHER; note = 2'-O-methyl modified nucleotide
  modified_base 12: mod_base = OTHER; note = 2'-O-methyl modified nucleotide
  modified_base 13: mod_base = OTHER; note = 2'-O-methyl modified nucleotide
  modified_base 14: mod_base = OTHER; note = 2'-fluoro modified nucleotide
  modified_base 15: mod_base = OTHER; note = 2'-O-methyl modified nucleotide
  modified_base 16: mod_base = OTHER; note = 2'-fluoro modified nucleotide
  modified_base 17: mod_base = OTHER; note = 2'-O-methyl modified nucleotide
  modified_base 18: mod_base = OTHER; note = 2'-O-methyl modified nucleotide
  modified_base 19: mod_base = OTHER; note = 2'-O-methyl modified nucleotide
  modified_base 20: mod_base = OTHER; note = 2'-O-methyl modified nucleotide
  modified_base 21: mod_base = OTHER; note = 2'-O-methyl modified nucleotide with 3'-phosphorothioate linkage
  modified_base 22: mod_base = OTHER; note = 2'-O-methyl modified nucleotide with 3'-phosphorothioate linkage
  modified_base 23: mod_base = OTHER; note = 2'-O-methyl modified nucleotide
cccacacaggatgagttcccagg

SEQ ID NO: 284 - RNA, 23 nt, synthetic construct
  source 1..23: mol_type = other RNA
  modified_base 1: mod_base = OTHER; note = 2'-O-methyl modified nucleotide with 3'-phosphorothioate linkage
  modified_base 2: mod_base = OTHER; note = 2'-fluoro modified nucleotide with 3'-phosphorothioate linkage
  modified_base 3: mod_base = OTHER; note = 2'-O-methyl modified nucleotide
  modified_base 4: mod_base = OTHER; note = 2'-O-methyl modified nucleotide
  modified_base 5: mod_base = OTHER; note = 2'-O-methyl modified nucleotide
  modified_base 6: mod_base = OTHER; note = 2'-fluoro modified nucleotide
  modified_base 7: mod_base = OTHER; note = 2'-O-methyl modified nucleotide
  modified_base 8: mod_base = OTHER; note = 2'-O-methyl modified nucleotide
  modified_base 9: mod_base = OTHER; note = 2'-O-methyl modified nucleotide
  modified_base 10: mod_base = OTHER; note = 2'-O-methyl modified nucleotide
  modified_base 11: mod_base = OTHER; note = 2'-O-methyl modified nucleotide
  modified_base 12: mod_base = OTHER; note = 2'-O-methyl modified nucleotide
  modified_base 13: mod_base = OTHER; note = 2'-O-methyl modified nucleotide
  modified_base 14: mod_base = OTHER; note = 2'-fluoro modified nucleotide
  modified_base 15: mod_base = OTHER; note = 2'-O-methyl modified nucleotide
  modified_base 16: mod_base = OTHER; note = 2'-fluoro modified nucleotide
  modified_base 17: mod_base = OTHER; note = 2'-O-methyl modified nucleotide
  modified_base 18: mod_base = OTHER; note = 2'-O-methyl modified nucleotide
  modified_base 19: mod_base = OTHER; note = 2'-O-methyl modified nucleotide
  modified_base 20: mod_base = OTHER; note = 2'-O-methyl modified nucleotide
  modified_base 21: mod_base = OTHER; note = 2'-O-methyl modified nucleotide with 3'-phosphorothioate linkage
  modified_base 22: mod_base = OTHER; note = 2'-O-methyl modified nucleotide with 3'-phosphorothioate linkage
  modified_base 23: mod_base = OTHER; note = 2'-O-methyl modified nucleotide
tggtcaagctgttggagctgcct

SEQ ID NO: 285 - RNA, 23 nt, synthetic construct
  source 1..23: mol_type = other RNA
  modified_base 1: mod_base = OTHER; note = 2'-O-methyl modified nucleotide with 3'-phosphorothioate linkage
  modified_base 2: mod_base = OTHER; note = 2'-fluoro modified nucleotide with 3'-phosphorothioate linkage
  modified_base 3: mod_base = OTHER; note = 2'-O-methyl modified nucleotide
  modified_base 4: mod_base = OTHER; note = 2'-O-methyl modified nucleotide
  modified_base 5: mod_base = OTHER; note = 2'-O-methyl modified nucleotide
  modified_base 6: mod_base = OTHER; note = 2'-fluoro modified nucleotide
  modified_base 7: mod_base = OTHER; note = 2'-O-methyl modified nucleotide
  modified_base 8: mod_base = OTHER; note = 2'-O-methyl modified nucleotide
  modified_base 9: mod_base = OTHER; note = 2'-O-methyl modified nucleotide
  modified_base 10: mod_base = OTHER; note = 2'-O-methyl modified nucleotide
  modified_base 11: mod_base = OTHER; note = 2'-O-methyl modified nucleotide
  modified_base 12: mod_base = OTHER; note = 2'-O-methyl modified nucleotide
  modified_base 13: mod_base = OTHER; note = 2'-O-methyl modified nucleotide
  modified_base 14: mod_base = OTHER; note = 2'-fluoro modified nucleotide
  modified_base 15: mod_base = OTHER; note = 2'-O-methyl modified nucleotide
  modified_base 16: mod_base = OTHER; note = 2'-fluoro modified nucleotide
  modified_base 17: mod_base = OTHER; note = 2'-O-methyl modified nucleotide
  modified_base 18: mod_base = OTHER; note = 2'-O-methyl modified nucleotide
  modified_base 19: mod_base = OTHER; note = 2'-O-methyl modified nucleotide
  modified_base 20: mod_base = OTHER; note = 2'-O-methyl modified nucleotide
  modified_base 21: mod_base = OTHER; note = 2'-O-methyl modified nucleotide with 3'-phosphorothioate linkage
  modified_base 22: mod_base = OTHER; note = 2'-O-methyl modified nucleotide with 3'-phosphorothioate linkage
  modified_base 23: mod_base = OTHER; note = 2'-O-methyl modified nucleotide
taggtctggtcaagctgttggag

SEQ ID NO: 286 - RNA, 23 nt, synthetic construct
  source 1..23: mol_type = other RNA
  modified_base 1: mod_base = OTHER; note = 2'-O-methyl modified nucleotide with 3'-phosphorothioate linkage
  modified_base 2: mod_base = OTHER; note = 2'-fluoro modified nucleotide with 3'-phosphorothioate linkage
  modified_base 3: mod_base = OTHER; note = 2'-O-methyl modified nucleotide
  modified_base 4: mod_base = OTHER; note = 2'-O-methyl modified nucleotide
  modified_base 5: mod_base = OTHER; note = 2'-O-methyl modified nucleotide
  modified_base 6: mod_base = OTHER; note = 2'-fluoro modified nucleotide
  modified_base 7: mod_base = OTHER; note = 2'-O-methyl modified nucleotide
  modified_base 8: mod_base = OTHER; note = 2'-O-methyl modified nucleotide
  modified_base 9: mod_base = OTHER; note = 2'-O-methyl modified nucleotide
  modified_base 10: mod_base = OTHER; note = 2'-O-methyl modified nucleotide
  modified_base 11: mod_base = OTHER; note = 2'-O-methyl modified nucleotide
  modified_base 12: mod_base = OTHER; note = 2'-O-methyl modified nucleotide
  modified_base 13: mod_base = OTHER; note = 2'-O-methyl modified nucleotide
  modified_base 14: mod_base = OTHER; note = 2'-fluoro modified nucleotide
  modified_base 15: mod_base = OTHER; note = 2'-O-methyl modified nucleotide
  modified_base 16: mod_base = OTHER; note = 2'-fluoro modified nucleotide
  modified_base 17: mod_base = OTHER; note = 2'-O-methyl modified nucleotide
  modified_base 18: mod_base = OTHER; note = 2'-O-methyl modified nucleotide
  modified_base 19: mod_base = OTHER; note = 2'-O-methyl modified nucleotide
  modified_base 20: mod_base = OTHER; note = 2'-O-methyl modified nucleotide
  modified_base 21: mod_base = OTHER; note = 2'-O-methyl modified nucleotide with 3'-phosphorothioate linkage
  modified_base 22: mod_base = OTHER; note = 2'-O-methyl modified nucleotide with 3'-phosphorothioate linkage
  modified_base 23: mod_base = OTHER; note = 2'-O-methyl modified nucleotide
gtccatcccagaatcacaagcca

SEQ ID NO: 287 - RNA, 23 nt, synthetic construct
  source 1..23: mol_type = other RNA
  modified_base 1: mod_base = OTHER; note = 2'-O-methyl modified nucleotide with 3'-phosphorothioate linkage
  modified_base 2: mod_base = OTHER; note = 2'-fluoro modified nucleotide with 3'-phosphorothioate linkage
  modified_base 3: mod_base = OTHER; note = 2'-O-methyl modified nucleotide
  modified_base 4: mod_base = OTHER; note = 2'-O-methyl modified nucleotide
  modified_base 5: mod_base = OTHER; note = 2'-O-methyl modified nucleotide
  modified_base 6: mod_base = OTHER; note = 2'-fluoro modified nucleotide
  modified_base 7: mod_base = OTHER; note = 2'-O-methyl modified nucleotide
  modified_base 8: mod_base = OTHER; note = 2'-O-methyl modified nucleotide
  modified_base 9: mod_base = OTHER; note = 2'-O-methyl modified nucleotide
  modified_base 10: mod_base = OTHER; note = 2'-O-methyl modified nucleotide
  modified_base 11: mod_base = OTHER; note = 2'-O-methyl modified nucleotide
  modified_base 12: mod_base = OTHER; note = 2'-O-methyl modified nucleotide
  modified_base 13: mod_base = OTHER; note = 2'-O-methyl modified nucleotide
  modified_base 14: mod_base = OTHER; note = 2'-fluoro modified nucleotide
  modified_base 15: mod_base = OTHER; note = 2'-O-methyl modified nucleotide
  modified_base 16: mod_base = OTHER; note = 2'-fluoro modified nucleotide
  modified_base 17: mod_base = OTHER; note = 2'-O-methyl modified nucleotide
  modified_base 18: mod_base = OTHER; note = 2'-O-methyl modified nucleotide
  modified_base 19: mod_base = OTHER; note = 2'-O-methyl modified nucleotide
  modified_base 20: mod_base = OTHER; note = 2'-O-methyl modified nucleotide
  modified_base 21: mod_base = OTHER; note = 2'-O-methyl modified nucleotide with 3'-phosphorothioate linkage
  modified_base 22: mod_base = OTHER; note = 2'-O-methyl modified nucleotide with 3'-phosphorothioate linkage
  modified_base 23: mod_base = OTHER; note = 2'-O-methyl modified nucleotide
ggtccatcccagaatcacaagcc

SEQ ID NO: 288 - RNA, 23 nt, synthetic construct
  source 1..23: mol_type = other RNA
  modified_base 1: mod_base = OTHER; note = 2'-O-methyl modified nucleotide with 3'-phosphorothioate linkage
  modified_base 2: mod_base = OTHER; note = 2'-fluoro modified nucleotide with 3'-phosphorothioate linkage
  modified_base 3: mod_base = OTHER; note = 2'-O-methyl modified nucleotide
  modified_base 4: mod_base = OTHER; note = 2'-O-methyl modified nucleotide
  modified_base 5: mod_base = OTHER; note = 2'-O-methyl modified nucleotide
  modified_base 6: mod_base = OTHER; note = 2'-fluoro modified nucleotide
  modified_base 7: mod_base = OTHER; note = 2'-O-methyl modified nucleotide
  modified_base 8: mod_base = OTHER; note = 2'-O-methyl modified nucleotide
  modified_base 9: mod_base = OTHER; note = 2'-O-methyl modified nucleotide
  modified_base 10: mod_base = OTHER; note = 2'-O-methyl modified nucleotide
  modified_base 11: mod_base = OTHER; note = 2'-O-methyl modified nucleotide
  modified_base 12: mod_base = OTHER; note = 2'-O-methyl modified nucleotide
  modified_base 13: mod_base = OTHER; note = 2'-O-methyl modified nucleotide
  modified_base 14: mod_base = OTHER; note = 2'-fluoro modified nucleotide
  modified_base 15: mod_base = OTHER; note = 2'-O-methyl modified nucleotide
  modified_base 16: mod_base = OTHER; note = 2'-fluoro modified nucleotide
  modified_base 17: mod_base = OTHER; note = 2'-O-methyl modified nucleotide
  modified_base 18: mod_base = OTHER; note = 2'-O-methyl modified nucleotide
  modified_base 19: mod_base = OTHER; note = 2'-O-methyl modified nucleotide
  modified_base 20: mod_base = OTHER; note = 2'-O-methyl modified nucleotide
  modified_base 21: mod_base = OTHER; note = 2'-O-methyl modified nucleotide with 3'-phosphorothioate linkage
  modified_base 22: mod_base = OTHER; note = 2'-O-methyl modified nucleotide with 3'-phosphorothioate linkage
  modified_base 23: mod_base = OTHER; note = 2'-O-methyl modified nucleotide
gggtttcttcctgagccagcgct

SEQ ID NO: 289 - RNA, 21 nt, synthetic construct
  source 1..21: mol_type = other RNA
  modified_base 1: mod_base = OTHER; note = 2'-O-methyl modified nucleotide with 3'-phosphorothioate linkage
  modified_base 2: mod_base = OTHER; note = 2'-O-methyl modified nucleotide with 3'-phosphorothioate linkage
  modified_base 3: mod_base = OTHER; note = 2'-O-methyl modified nucleotide
  modified_base 4: mod_base = OTHER; note = 2'-O-methyl modified nucleotide
  modified_base 5: mod_base = OTHER; note = 2'-O-methyl modified nucleotide
  modified_base 6: mod_base = OTHER; note = 2'-O-methyl modified nucleotide
  modified_base 7: mod_base = OTHER; note = 2'-fluoro modified nucleotide
  modified_base 8: mod_base = OTHER; note = 2'-O-methyl modified nucleotide
  modified_base 9: mod_base = OTHER; note = 2'-fluoro modified nucleotide
  modified_base 10: mod_base = OTHER; note = 2'-fluoro modified nucleotide
  modified_base 11: mod_base = OTHER; note = 2'-fluoro modified nucleotide
  modified_base 12: mod_base = OTHER; note = 2'-O-methyl modified nucleotide
  modified_base 13: mod_base = OTHER; note = 2'-O-methyl modified nucleotide
  modified_base 14: mod_base = OTHER; note = 2'-O-methyl modified nucleotide
  modified_base 15: mod_base = OTHER; note = 2'-O-methyl modified nucleotide
  modified_base 16: mod_base = OTHER; note = 2'-O-methyl modified nucleotide
  modified_base 17: mod_base = OTHER; note = 2'-O-methyl modified nucleotide
  modified_base 18: mod_base = OTHER; note = 2'-O-methyl modified nucleotide
  modified_base 19: mod_base = OTHER; note = 2'-O-methyl modified nucleotide with 3'-phosphorothioate linkage
  modified_base 20: mod_base = OTHER; note = 2'-O-methyl modified nucleotide with 3'-phosphorothioate linkage
  modified_base 21: mod_base = OTHER; note = 2'-O-methyl modified nucleotide
ctgaagaaggtgatgagacgg

SEQ ID NO: 290 - RNA, 21 nt, synthetic construct
  source 1..21: mol_type = other RNA
  modified_base 1: mod_base = OTHER; note = 2'-O-methyl modified nucleotide with 3'-phosphorothioate linkage
  modified_base 2: mod_base = OTHER; note = 2'-O-methyl modified nucleotide with 3'-phosphorothioate linkage
  modified_base 3: mod_base = OTHER; note = 2'-O-methyl modified nucleotide
  modified_base 4: mod_base = OTHER; note = 2'-O-methyl modified nucleotide
  modified_base 5: mod_base = OTHER; note = 2'-O-methyl modified nucleotide
  modified_base 6: mod_base = OTHER; note = 2'-O-methyl modified nucleotide
  modified_base 7: mod_base = OTHER; note = 2'-fluoro modified nucleotide
  modified_base 8: mod_base = OTHER; note = 2'-O-methyl modified nucleotide
  modified_base 9: mod_base = OTHER; note = 2'-fluoro modified nucleotide
  modified_base 10: mod_base = OTHER; note = 2'-fluoro modified nucleotide
  modified_base 11: mod_base = OTHER; note = 2'-fluoro modified nucleotide
  modified_base 12: mod_base = OTHER; note = 2'-O-methyl modified nucleotide
  modified_base 13: mod_base = OTHER; note = 2'-O-methyl modified nucleotide
  modified_base 14: mod_base = OTHER; note = 2'-O-methyl modified nucleotide
  modified_base 15: mod_base = OTHER; note = 2'-O-methyl modified nucleotide
  modified_base 16: mod_base = OTHER; note = 2'-O-methyl modified nucleotide
  modified_base 17: mod_base = OTHER; note = 2'-O-methyl modified nucleotide
  modified_base 18: mod_base = OTHER; note = 2'-O-methyl modified nucleotide
  modified_base 19: mod_base = OTHER; note = 2'-O-methyl modified nucleotide with 3'-phosphorothioate linkage
  modified_base 20: mod_base = OTHER; note = 2'-O-methyl modified nucleotide with 3'-phosphorothioate linkage
  modified_base 21: mod_base = OTHER; note = 2'-O-methyl modified nucleotide
gaagaaggtgatgagacggat

SEQ ID NO: 291 - RNA, 21 nt, synthetic construct
  source 1..21: mol_type = other RNA
  modified_base 1: mod_base = OTHER; note = 2'-O-methyl modified nucleotide with 3'-phosphorothioate linkage
  modified_base 2: mod_base = OTHER; note = 2'-O-methyl modified nucleotide with 3'-phosphorothioate linkage
  modified_base 3: mod_base = OTHER; note = 2'-O-methyl modified nucleotide
  modified_base 4: mod_base = OTHER; note = 2'-O-methyl modified nucleotide
  modified_base 5: mod_base = OTHER; note = 2'-O-methyl modified nucleotide
  modified_base 6: mod_base = OTHER; note = 2'-O-methyl modified nucleotide
  modified_base 7: mod_base = OTHER; note = 2'-fluoro modified nucleotide
  modified_base 8: mod_base = OTHER; note = 2'-O-methyl modified nucleotide
  modified_base 9: mod_base = OTHER; note = 2'-fluoro modified nucleotide
  modified_base 10: mod_base = OTHER; note = 2'-fluoro modified nucleotide
  modified_base 11: mod_base = OTHER; note = 2'-fluoro modified nucleotide
  modified_base 12: mod_base = OTHER; note = 2'-O-methyl modified nucleotide
  modified_base 13: mod_base = OTHER; note = 2'-O-methyl modified nucleotide
  modified_base 14: mod_base = OTHER; note = 2'-O-methyl modified nucleotide
  modified_base 15: mod_base = OTHER; note = 2'-O-methyl modified nucleotide
  modified_base 16: mod_base = OTHER; note = 2'-O-methyl modified nucleotide
  modified_base 17: mod_base = OTHER; note = 2'-O-methyl modified nucleotide
  modified_base 18: mod_base = OTHER; note = 2'-O-methyl modified nucleotide
  modified_base 19: mod_base = OTHER; note = 2'-O-methyl modified nucleotide with 3'-phosphorothioate linkage
  modified_base 20: mod_base = OTHER; note = 2'-O-methyl modified nucleotide with 3'-phosphorothioate linkage
  modified_base 21: mod_base = OTHER; note = 2'-O-methyl modified nucleotide
tgaagaggccagtgtgaagat

SEQ ID NO: 292 - RNA, 21 nt, synthetic construct
  source 1..21: mol_type = other RNA
  modified_base 1: mod_base = OTHER; note = 2'-O-methyl modified nucleotide with 3'-phosphorothioate linkage
  modified_base 2: mod_base = OTHER; note = 2'-O-methyl modified nucleotide with 3'-phosphorothioate linkage
  modified_base 3: mod_base = OTHER; note = 2'-O-methyl modified nucleotide
  modified_base 4: mod_base = OTHER; note = 2'-O-methyl modified nucleotide
  modified_base 5: mod_base = OTHER; note = 2'-O-methyl modified nucleotide
  modified_base 6: mod_base = OTHER; note = 2'-O-methyl modified nucleotide
  modified_base 7: mod_base = OTHER; note = 2'-fluoro modified nucleotide
  modified_base 8: mod_base = OTHER; note = 2'-O-methyl modified nucleotide
  modified_base 9: mod_base = OTHER; note = 2'-fluoro modified nucleotide
  modified_base 10: mod_base = OTHER; note = 2'-fluoro modified nucleotide
  modified_base 11: mod_base = OTHER; note = 2'-fluoro modified nucleotide
  modified_base 12: mod_base = OTHER; note = 2'-O-methyl modified nucleotide
  modified_base 13: mod_base = OTHER; note = 2'-O-methyl modified nucleotide
  modified_base 14: mod_base = OTHER; note = 2'-O-methyl modified nucleotide
  modified_base 15: mod_base = OTHER; note = 2'-O-methyl modified nucleotide
  modified_base 16: mod_base = OTHER; note = 2'-O-methyl modified nucleotide
  modified_base 17: mod_base = OTHER; note = 2'-O-methyl modified nucleotide
  modified_base 18: mod_base = OTHER; note = 2'-O-methyl modified nucleotide
  modified_base 19: mod_base = OTHER; note = 2'-O-methyl modified nucleotide with 3'-phosphorothioate linkage
  modified_base 20: mod_base = OTHER; note = 2'-O-methyl modified nucleotide with 3'-phosphorothioate linkage
  modified_base 21: mod_base = OTHER; note = 2'-O-methyl modified nucleotide
aagaggccagtgtgaagatgc

SEQ ID NO: 293 - RNA, 21 nt, synthetic construct
  source 1..21: mol_type = other RNA
  modified_base 1: mod_base = OTHER; note = 2'-O-methyl modified nucleotide with 3'-phosphorothioate linkage
  modified_base 2: mod_base = OTHER; note = 2'-O-methyl modified nucleotide with 3'-phosphorothioate linkage
  modified_base 3: mod_base = OTHER; note = 2'-O-methyl modified nucleotide
  modified_base 4: mod_base = OTHER; note = 2'-O-methyl modified nucleotide
  modified_base 5: mod_base = OTHER; note = 2'-O-methyl modified nucleotide
  modified_base 6: mod_base = OTHER; note = 2'-O-methyl modified nucleotide
  modified_base 7: mod_base = OTHER; note = 2'-fluoro modified nucleotide
  modified_base 8: mod_base = OTHER; note = 2'-O-methyl modified nucleotide
  modified_base 9: mod_base = OTHER; note = 2'-fluoro modified nucleotide
  modified_base 10: mod_base = OTHER; note = 2'-fluoro modified nucleotide
  modified_base 11: mod_base = OTHER; note = 2'-fluoro modified nucleotide
  modified_base 12: mod_base = OTHER; note = 2'-O-methyl modified nucleotide
  modified_base 13: mod_base = OTHER; note = 2'-O-methyl modified nucleotide
  modified_base 14: mod_base = OTHER; note = 2'-O-methyl modified nucleotide
  modified_base 15: mod_base = OTHER; note = 2'-O-methyl modified nucleotide
  modified_base 16: mod_base = OTHER; note = 2'-O-methyl modified nucleotide
  modified_base 17: mod_base = OTHER; note = 2'-O-methyl modified nucleotide
  modified_base 18: mod_base = OTHER; note = 2'-O-methyl modified nucleotide
  modified_base 19: mod_base = OTHER; note = 2'-O-methyl modified nucleotide with 3'-phosphorothioate linkage
  modified_base 20: mod_base = OTHER; note = 2'-O-methyl modified nucleotide with 3'-phosphorothioate linkage
  modified_base 21: mod_base = OTHER; note = 2'-O-methyl modified nucleotide
gctgcccacctacgtgcgctc

SEQ ID NO: 294 - RNA, 21 nt, synthetic construct
  source 1..21: mol_type = other RNA
  modified_base 1: mod_base = OTHER; note = 2'-O-methyl modified nucleotide with 3'-phosphorothioate linkage
  modified_base 2: mod_base = OTHER; note = 2'-O-methyl modified nucleotide with 3'-phosphorothioate linkage
  modified_base 3: mod_base = OTHER; note = 2'-O-methyl modified nucleotide
  modified_base 4: mod_base = OTHER; note = 2'-O-methyl modified nucleotide
  modified_base 5: mod_base = OTHER; note = 2'-O-methyl modified nucleotide
  modified_base 6: mod_base = OTHER; note = 2'-O-methyl modified nucleotide
  modified_base 7: mod_base = OTHER; note = 2'-fluoro modified nucleotide
  modified_base 8: mod_base = OTHER; note = 2'-O-methyl modified nucleotide
  modified_base 9: mod_base = OTHER; note = 2'-fluoro modified nucleotide
  modified_base 10: mod_base = OTHER; note = 2'-fluoro modified nucleotide
  modified_base 11: mod_base = OTHER; note = 2'-fluoro modified nucleotide
  modified_base 12: mod_base = OTHER; note = 2'-O-methyl modified nucleotide
  modified_base 13: mod_base = OTHER; note = 2'-O-methyl modified nucleotide
  modified_base 14: mod_base = OTHER; note = 2'-O-methyl modified nucleotide
  modified_base 15: mod_base = OTHER; note = 2'-O-methyl modified nucleotide
  modified_base 16: mod_base = OTHER; note = 2'-O-methyl modified nucleotide
  modified_base 17: mod_base = OTHER; note = 2'-O-methyl modified nucleotide
  modified_base 18: mod_base = OTHER; note = 2'-O-methyl modified nucleotide
  modified_base 19: mod_base = OTHER; note = 2'-O-methyl modified nucleotide with 3'-phosphorothioate linkage
  modified_base 20: mod_base = OTHER; note = 2'-O-methyl modified nucleotide with 3'-phosphorothioate linkage
  modified_base 21: mod_base = OTHER; note = 2'-O-methyl modified nucleotide
gtgaaggtgggagaaggtgag

SEQ ID NO: 295 - RNA, 21 nt, synthetic construct
  source 1..21: mol_type = other RNA
  modified_base 1: mod_base = OTHER; note = 2'-O-methyl modified nucleotide with 3'-phosphorothioate linkage
  modified_base 2: mod_base = OTHER; note = 2'-O-methyl modified nucleotide with 3'-phosphorothioate linkage
  modified_base 3: mod_base = OTHER; note = 2'-O-methyl modified nucleotide
  modified_base 4: mod_base = OTHER; note = 2'-O-methyl modified nucleotide
  modified_base 5: mod_base = OTHER; note = 2'-O-methyl modified nucleotide
  modified_base 6: mod_base = OTHER; note = 2'-O-methyl modified nucleotide
  modified_base 7: mod_base = OTHER; note = 2'-fluoro modified nucleotide
  modified_base 8: mod_base = OTHER; note = 2'-O-methyl modified nucleotide
  modified_base 9: mod_base = OTHER; note = 2'-fluoro modified nucleotide
  modified_base 10: mod_base = OTHER; note = 2'-fluoro modified nucleotide
  modified_base 11: mod_base = OTHER; note = 2'-fluoro modified nucleotide
  modified_base 12: mod_base = OTHER; note = 2'-O-methyl modified nucleotide
  modified_base 13: mod_base = OTHER; note = 2'-O-methyl modified nucleotide
  modified_base 14: mod_base = OTHER; note = 2'-O-methyl modified nucleotide
  modified_base 15: mod_base = OTHER; note = 2'-O-methyl modified nucleotide
  modified_base 16: mod_base = OTHER; note = 2'-O-methyl modified nucleotide
  modified_base 17: mod_base = OTHER; note = 2'-O-methyl modified nucleotide
  modified_base 18: mod_base = OTHER; note = 2'-O-methyl modified nucleotide
  modified_base 19: mod_base = OTHER; note = 2'-O-methyl modified nucleotide with 3'-phosphorothioate linkage
  modified_base 20: mod_base = OTHER; note = 2'-O-methyl modified nucleotide with 3'-phosphorothioate linkage
  modified_base 21: mod_base = OTHER; note = 2'-O-methyl modified nucleotide
ggagcgtgaagaccaaacacc

SEQ ID NO: 296 - RNA, 21 nt, synthetic construct
  source 1..21: mol_type = other RNA
  modified_base 1: mod_base = OTHER; note = 2'-O-methyl modified nucleotide with 3'-phosphorothioate linkage
  modified_base 2: mod_base = OTHER; note = 2'-O-methyl modified nucleotide with 3'-phosphorothioate linkage
  modified_base 3: mod_base = OTHER; note = 2'-O-methyl modified nucleotide
  modified_base 4: mod_base = OTHER; note = 2'-O-methyl modified nucleotide
  modified_base 5: mod_base = OTHER; note = 2'-O-methyl modified nucleotide
  modified_base 6: mod_base = OTHER; note = 2'-O-methyl modified nucleotide
  modified_base 7: mod_base = OTHER; note = 2'-fluoro modified nucleotide
  modified_base 8: mod_base = OTHER; note = 2'-O-methyl modified nucleotide
  modified_base 9: mod_base = OTHER; note = 2'-fluoro modified nucleotide
  modified_base 10: mod_base = OTHER; note = 2'-fluoro modified nucleotide
  modified_base 11: mod_base = OTHER; note = 2'-fluoro modified nucleotide
  modified_base 12: mod_base = OTHER; note = 2'-O-methyl modified nucleotide
  modified_base 13: mod_base = OTHER; note = 2'-O-methyl modified nucleotide
  modified_base 14: mod_base = OTHER; note = 2'-O-methyl modified nucleotide
  modified_base 15: mod_base = OTHER; note = 2'-O-methyl modified nucleotide
  modified_base 16: mod_base = OTHER; note = 2'-O-methyl modified nucleotide
  modified_base 17: mod_base = OTHER; note = 2'-O-methyl modified nucleotide
  modified_base 18: mod_base = OTHER; note = 2'-O-methyl modified nucleotide
  modified_base 19: mod_base = OTHER; note = 2'-O-methyl modified nucleotide with 3'-phosphorothioate linkage
  modified_base 20: mod_base = OTHER; note = 2'-O-methyl modified nucleotide with 3'-phosphorothioate linkage
  modified_base 21: mod_base = OTHER; note = 2'-O-methyl modified nucleotide
cgtgaagaccaaacaccagat

SEQ ID NO: 297 - RNA, 21 nt, synthetic construct
  source 1..21: mol_type = other RNA
  modified_base 1: mod_base = OTHER; note = 2'-O-methyl modified nucleotide with 3'-phosphorothioate linkage
  modified_base 2: mod_base = OTHER; note = 2'-O-methyl modified nucleotide with 3'-phosphorothioate linkage
  modified_base 3: mod_base = OTHER; note = 2'-O-methyl modified nucleotide
  modified_base 4: mod_base = OTHER; note = 2'-O-methyl modified nucleotide
  modified_base 5: mod_base = OTHER; note = 2'-O-methyl modified nucleotide
  modified_base 6: mod_base = OTHER; note = 2'-O-methyl modified nucleotide
  modified_base 7: mod_base = OTHER; note = 2'-fluoro modified nucleotide
  modified_base 8: mod_base = OTHER; note = 2'-O-methyl modified nucleotide
  modified_base 9: mod_base = OTHER; note = 2'-fluoro modified nucleotide
  modified_base 10: mod_base = OTHER; note = 2'-fluoro modified nucleotide
  modified_base 11: mod_base = OTHER; note = 2'-fluoro modified nucleotide
  modified_base 12: mod_base = OTHER; note = 2'-O-methyl modified nucleotide
  modified_base 13: mod_base = OTHER; note = 2'-O-methyl modified nucleotide
  modified_base 14: mod_base = OTHER; note = 2'-O-methyl modified nucleotide
  modified_base 15: mod_base = OTHER; note = 2'-O-methyl modified nucleotide
  modified_base 16: mod_base = OTHER; note = 2'-O-methyl modified nucleotide
  modified_base 17: mod_base = OTHER; note = 2'-O-methyl modified nucleotide
  modified_base 18: mod_base = OTHER; note = 2'-O-methyl modified nucleotide
  modified_base 19: mod_base = OTHER; note = 2'-O-methyl modified nucleotide with 3'-phosphorothioate linkage
  modified_base 20: mod_base = OTHER; note = 2'-O-methyl modified nucleotide with 3'-phosphorothioate linkage
  modified_base 21: mod_base = OTHER; note = 2'-O-methyl modified nucleotide
tgaagaccaaacaccagatgt

SEQ ID NO: 298 - RNA, 21 nt, synthetic construct
  source 1..21: mol_type = other RNA
  modified_base 1: mod_base = OTHER; note = 2'-O-methyl modified nucleotide with 3'-phosphorothioate linkage
  modified_base 2: mod_base = OTHER; note = 2'-O-methyl modified nucleotide with 3'-phosphorothioate linkage
  modified_base 3: mod_base = OTHER; note = 2'-O-methyl modified nucleotide
  modified_base 4: mod_base = OTHER; note = 2'-O-methyl modified nucleotide
  modified_base 5: mod_base = OTHER; note = 2'-O-methyl modified nucleotide
  modified_base 6: mod_base = OTHER; note = 2'-O-methyl modified nucleotide
  modified_base 7: mod_base = OTHER; note = 2'-fluoro modified nucleotide
  modified_base 8: mod_base = OTHER; note = 2'-O-methyl modified nucleotide
  modified_base 9: mod_base = OTHER; note = 2'-fluoro modified nucleotide
  modified_base 10: mod_base = OTHER; note = 2'-fluoro modified nucleotide
  modified_base 11: mod_base = OTHER; note = 2'-fluoro modified nucleotide
  modified_base 12: mod_base = OTHER; note = 2'-O-methyl modified nucleotide
  modified_base 13: mod_base = OTHER; note = 2'-O-methyl modified nucleotide
  modified_base 14: mod_base = OTHER; note = 2'-O-methyl modified nucleotide
  modified_base 15: mod_base = OTHER; note = 2'-O-methyl modified nucleotide
  modified_base 16: mod_base = OTHER; note = 2'-O-methyl modified nucleotide
  modified_base 17: mod_base = OTHER; note = 2'-O-methyl modified nucleotide
  modified_base 18: mod_base = OTHER; note = 2'-O-methyl modified nucleotide
  modified_base 19: mod_base = OTHER; note = 2'-O-methyl modified nucleotide with 3'-phosphorothioate linkage
  modified_base 20: mod_base = OTHER; note = 2'-O-methyl modified nucleotide with 3'-phosphorothioate linkage
  modified_base 21: mod_base = OTHER; note = 2'-O-methyl modified nucleotide
gaagaccaaacaccagatgta

SEQ ID NO: 299 - RNA, 21 nt, synthetic construct
  source 1..21: mol_type = other RNA
  modified_base 1: mod_base = OTHER; note = 2'-O-methyl modified nucleotide with 3'-phosphorothioate linkage
  modified_base 2: mod_base = OTHER; note = 2'-O-methyl modified nucleotide with 3'-phosphorothioate linkage
  modified_base 3: mod_base = OTHER; note = 2'-O-methyl modified nucleotide
  modified_base 4: mod_base = OTHER; note = 2'-O-methyl modified nucleotide
  modified_base 5: mod_base = OTHER; note = 2'-O-methyl modified nucleotide
  modified_base 6: mod_base = OTHER; note = 2'-O-methyl modified nucleotide
  modified_base 7: mod_base = OTHER; note = 2'-fluoro modified nucleotide
  modified_base 8: mod_base = OTHER; note = 2'-O-methyl modified nucleotide
  modified_base 9: mod_base = OTHER; note = 2'-fluoro modified nucleotide
  modified_base 10: mod_base = OTHER; note = 2'-fluoro modified nucleotide
  modified_base 11: mod_base = OTHER; note = 2'-fluoro modified nucleotide
  modified_base 12: mod_base = OTHER; note = 2'-O-methyl modified nucleotide
  modified_base 13: mod_base = OTHER; note = 2'-O-methyl modified nucleotide
  modified_base 14: mod_base = OTHER; note = 2'-O-methyl modified nucleotide
  modified_base 15: mod_base = OTHER; note = 2'-O-methyl modified nucleotide
  modified_base 16: mod_base = OTHER; note = 2'-O-methyl modified nucleotide
  modified_base 17: mod_base = OTHER; note = 2'-O-methyl modified nucleotide
  modified_base 18: mod_base = OTHER; note = 2'-O-methyl modified nucleotide
  modified_base 19: mod_base = OTHER; note = 2'-O-methyl modified nucleotide with 3'-phosphorothioate linkage
  modified_base 20: mod_base = OTHER; note = 2'-O-methyl modified nucleotide with 3'-phosphorothioate linkage
  modified_base 21: mod_base = OTHER; note = 2'-O-methyl modified nucleotide
agaccaaacaccagatgtact

SEQ ID NO: 300 - RNA, 21 nt, synthetic construct
  source 1..21: mol_type = other RNA
  modified_base 1: mod_base = OTHER; note = 2'-O-methyl modified nucleotide with 3'-phosphorothioate linkage
  modified_base 2: mod_base = OTHER; note = 2'-O-methyl modified nucleotide with 3'-phosphorothioate linkage
  modified_base 3: mod_base = OTHER; note = 2'-O-methyl modified nucleotide
  modified_base 4: mod_base = OTHER; note = 2'-O-methyl modified nucleotide
  modified_base 5: mod_base = OTHER; note = 2'-O-methyl modified nucleotide
  modified_base 6: mod_base = OTHER; note = 2'-O-methyl modified nucleotide
  modified_base 7: mod_base = OTHER; note = 2'-fluoro modified nucleotide
  modified_base 8: mod_base = OTHER; note = 2'-O-methyl modified nucleotide
  modified_base 9: mod_base = OTHER; note = 2'-fluoro modified nucleotide
  modified_base 10: mod_base = OTHER; note = 2'-fluoro modified nucleotide
  modified_base 11: mod_base = OTHER; note = 2'-fluoro modified nucleotide
  modified_base 12: mod_base = OTHER; note = 2'-O-methyl modified nucleotide
  modified_base 13: mod_base = OTHER; note = 2'-O-methyl modified nucleotide
  modified_base 14: mod_base = OTHER; note = 2'-O-methyl modified nucleotide
  modified_base 15: mod_base = OTHER; note = 2'-O-methyl modified nucleotide
  modified_base 16: mod_base = OTHER; note = 2'-O-methyl modified nucleotide
  modified_base 17: mod_base = OTHER; note = 2'-O-methyl modified nucleotide
  modified_base 18: mod_base = OTHER; note = 2'-O-methyl modified nucleotide
  modified_base 19: mod_base = OTHER; note = 2'-O-methyl modified nucleotide with 3'-phosphorothioate linkage
  modified_base 20: mod_base = OTHER; note = 2'-O-methyl modified nucleotide with 3'-phosphorothioate linkage
  modified_base 21: mod_base = OTHER; note = 2'-O-methyl modified nucleotide
tgaccggcactgctgagatgc

SEQ ID NO: 301 - RNA, 21 nt, synthetic construct
  source 1..21: mol_type = other RNA
  modified_base 1: mod_base = OTHER; note = 2'-O-methyl modified nucleotide with 3'-phosphorothioate linkage
  modified_base 2: mod_base = OTHER; note = 2'-O-methyl modified nucleotide with 3'-phosphorothioate linkage
  modified_base 3: mod_base = OTHER; note = 2'-O-methyl modified nucleotide
  modified_base 4: mod_base = OTHER; note = 2'-O-methyl modified nucleotide
  modified_base 5: mod_base = OTHER; note = 2'-O-methyl modified nucleotide
  modified_base 6: mod_base = OTHER; note = 2'-O-methyl modified nucleotide
  modified_base 7: mod_base = OTHER; note = 2'-fluoro modified nucleotide
  modified_base 8: mod_base = OTHER; note = 2'-O-methyl modified nucleotide
  modified_base 9: mod_base = OTHER; note = 2'-fluoro modified nucleotide
  modified_base 10: mod_base = OTHER; note = 2'-fluoro modified nucleotide
  modified_base 11: mod_base = OTHER; note = 2'-fluoro modified nucleotide
  modified_base 12: mod_base = OTHER; note = 2'-O-methyl modified nucleotide
  modified_base 13: mod_base = OTHER; note = 2'-O-methyl modified nucleotide
  modified_base 14: mod_base = OTHER; note = 2'-O-methyl modified nucleotide
  modified_base 15: mod_base = OTHER; note = 2'-O-methyl modified nucleotide
  modified_base 16: mod_base = OTHER; note = 2'-O-methyl modified nucleotide
  modified_base 17: mod_base = OTHER; note = 2'-O-methyl modified nucleotide
  modified_base 18: mod_base = OTHER; note = 2'-O-methyl modified nucleotide
  modified_base 19: mod_base = OTHER; note = 2'-O-methyl modified nucleotide with 3'-phosphorothioate linkage
  modified_base 20: mod_base = OTHER; note = 2'-O-methyl modified nucleotide with 3'-phosphorothioate linkage
  modified_base 21: mod_base = OTHER; note = 2'-O-methyl modified nucleotide
gaccggcactgctgagatgct

SEQ ID NO: 302 - RNA, 21 nt, synthetic construct
  source 1..21: mol_type = other RNA
  modified_base 1: mod_base = OTHER; note = 2'-O-methyl modified nucleotide with 3'-phosphorothioate linkage
  modified_base 2: mod_base = OTHER; note = 2'-O-methyl modified nucleotide with 3'-phosphorothioate linkage
  modified_base 3: mod_base = OTHER; note = 2'-O-methyl modified nucleotide
  modified_base 4: mod_base = OTHER; note = 2'-O-methyl modified nucleotide
  modified_base 5: mod_base = OTHER; note = 2'-O-methyl modified nucleotide
  modified_base 6: mod_base = OTHER; note = 2'-O-methyl modified nucleotide
  modified_base 7: mod_base = OTHER; note = 2'-fluoro modified nucleotide
  modified_base 8: mod_base = OTHER; note = 2'-O-methyl modified nucleotide
  modified_base 9: mod_base = OTHER; note = 2'-fluoro modified nucleotide
  modified_base 10: mod_base = OTHER; note = 2'-fluoro modified nucleotide
  modified_base 11: mod_base = OTHER; note = 2'-fluoro modified nucleotide
  modified_base 12: mod_base = OTHER; note = 2'-O-methyl modified nucleotide
  modified_base 13: mod_base = OTHER; note = 2'-O-methyl modified nucleotide
  modified_base 14: mod_base = OTHER; note = 2'-O-methyl modified nucleotide
  modified_base 15: mod_base = OTHER; note = 2'-O-methyl modified nucleotide
  modified_base 16: mod_base = OTHER; note = 2'-O-methyl modified nucleotide
  modified_base 17: mod_base = OTHER; note = 2'-O-methyl modified nucleotide
  modified_base 18: mod_base = OTHER; note = 2'-O-methyl modified nucleotide
  modified_base 19: mod_base = OTHER; note = 2'-O-methyl modified nucleotide with 3'-phosphorothioate linkage
  modified_base 20: mod_base = OTHER; note = 2'-O-methyl modified nucleotide with 3'-phosphorothioate linkage
  modified_base 21: mod_base = OTHER; note = 2'-O-methyl modified nucleotide
cactgctgagatgctcttcga

SEQ ID NO: 303 - RNA, 21 nt, synthetic construct
  source 1..21: mol_type = other RNA
  modified_base 1: mod_base = OTHER; note = 2'-O-methyl modified nucleotide with 3'-phosphorothioate linkage
  modified_base 2: mod_base = OTHER; note = 2'-O-methyl modified nucleotide with 3'-phosphorothioate linkage
  modified_base 3: mod_base = OTHER; note = 2'-O-methyl modified nucleotide
  modified_base 4: mod_base = OTHER; note = 2'-O-methyl modified nucleotide
  modified_base 5: mod_base = OTHER; note = 2'-O-methyl modified nucleotide
  modified_base 6: mod_base = OTHER; note = 2'-O-methyl modified nucleotide
  modified_base 7: mod_base = OTHER; note = 2'-fluoro modified nucleotide
  modified_base 8: mod_base = OTHER; note = 2'-O-methyl modified nucleotide
  modified_base 9: mod_base = OTHER; note = 2'-fluoro modified nucleotide
  modified_base 10: mod_base = OTHER; note = 2'-fluoro modified nucleotide
  modified_base 11: mod_base = OTHER; note = 2'-fluoro modified nucleotide
  modified_base 12: mod_base = OTHER; note = 2'-O-methyl modified nucleotide
  modified_base 13: mod_base = OTHER; note = 2'-O-methyl modified nucleotide
  modified_base 14: mod_base = OTHER; note = 2'-O-methyl modified nucleotide
  modified_base 15: mod_base = OTHER; note = 2'-O-methyl modified nucleotide
  modified_base 16: mod_base = OTHER; note = 2'-O-methyl modified nucleotide
  modified_base 17: mod_base = OTHER; note = 2'-O-methyl modified nucleotide
  modified_base 18: mod_base = OTHER; note = 2'-O-methyl modified nucleotide
  modified_base 19: mod_base = OTHER; note = 2'-O-methyl modified nucleotide with 3'-phosphorothioate linkage
  modified_base 20: mod_base = OTHER; note = 2'-O-methyl modified nucleotide with 3'-phosphorothioate linkage
  modified_base 21: mod_base = OTHER; note = 2'-O-methyl modified nucleotide
actgctgagatgctcttcgac

SEQ ID NO: 304 - RNA, 21 nt, synthetic construct
  source 1..21: mol_type = other RNA
  modified_base 1: mod_base = OTHER; note = 2'-O-methyl modified nucleotide with 3'-phosphorothioate linkage
  modified_base 2: mod_base = OTHER; note = 2'-O-methyl modified nucleotide with 3'-phosphorothioate linkage
  modified_base 3: mod_base = OTHER; note = 2'-O-methyl modified nucleotide
  modified_base 4: mod_base = OTHER; note = 2'-O-methyl modified nucleotide
  modified_base 5: mod_base = OTHER; note = 2'-O-methyl modified nucleotide
  modified_base 6: mod_base = OTHER; note = 2'-O-methyl modified nucleotide
  modified_base 7: mod_base = OTHER; note = 2'-fluoro modified nucleotide
  modified_base 8: mod_base = OTHER; note = 2'-O-methyl modified nucleotide
  modified_base 9: mod_base = OTHER; note = 2'-fluoro modified nucleotide
  modified_base 10: mod_base = OTHER; note = 2'-fluoro modified nucleotide
  modified_base 11: mod_base = OTHER; note = 2'-fluoro modified nucleotide
  modified_base 12: mod_base = OTHER; note = 2'-O-methyl modified nucleotide
  modified_base 13: mod_base = OTHER; note = 2'-O-methyl modified nucleotide
  modified_base 14: mod_base = OTHER; note = 2'-O-methyl modified nucleotide
  modified_base 15: mod_base = OTHER; note = 2'-O-methyl modified nucleotide
  modified_base 16: mod_base = OTHER; note = 2'-O-methyl modified nucleotide
  modified_base 17: mod_base = OTHER; note = 2'-O-methyl modified nucleotide
  modified_base 18: mod_base = OTHER; note = 2'-O-methyl modified nucleotide
  modified_base 19: mod_base = OTHER; note = 2'-O-methyl modified nucleotide with 3'-phosphorothioate linkage
  modified_base 20: mod_base = OTHER; note = 2'-O-methyl modified nucleotide with 3'-phosphorothioate linkage
  modified_base 21: mod_base = OTHER; note = 2'-O-methyl modified nucleotide
tgagatgctcttcgactacat

SEQ ID NO: 305 - RNA, 21 nt, synthetic construct
  source 1..21: mol_type = other RNA
  modified_base 1: mod_base = OTHER; note = 2'-O-methyl modified nucleotide with 3'-phosphorothioate linkage
  modified_base 2: mod_base = OTHER; note = 2'-O-methyl modified nucleotide with 3'-phosphorothioate linkage
  modified_base 3: mod_base = OTHER; note = 2'-O-methyl modified nucleotide
  modified_base 4: mod_base = OTHER; note = 2'-O-methyl modified nucleotide
  modified_base 5: mod_base = OTHER; note = 2'-O-methyl modified nucleotide
  modified_base 6: mod_base = OTHER; note = 2'-O-methyl modified nucleotide
  modified_base 7: mod_base = OTHER; note = 2'-fluoro modified nucleotide
  modified_base 8: mod_base = OTHER; note = 2'-O-methyl modified nucleotide
  modified_base 9: mod_base = OTHER; note = 2'-fluoro modified nucleotide
  modified_base 10: mod_base = OTHER; note = 2'-fluoro modified nucleotide
  modified_base 11: mod_base = OTHER; note = 2'-fluoro modified nucleotide
  modified_base 12: mod_base = OTHER; note = 2'-O-methyl modified nucleotide
  modified_base 13: mod_base = OTHER; note = 2'-O-methyl modified nucleotide
  modified_base 14: mod_base = OTHER; note = 2'-O-methyl modified nucleotide
  modified_base 15: mod_base = OTHER; note = 2'-O-methyl modified nucleotide
  modified_base 16: mod_base = OTHER; note = 2'-O-methyl modified nucleotide
  modified_base 17: mod_base = OTHER; note = 2'-O-methyl modified nucleotide
  modified_base 18: mod_base = OTHER; note = 2'-O-methyl modified nucleotide
  modified_base 19: mod_base = OTHER; note = 2'-O-methyl modified nucleotide with 3'-phosphorothioate linkage
  modified_base 20: mod_base = OTHER; note = 2'-O-methyl modified nucleotide with 3'-phosphorothioate linkage
  modified_base 21: mod_base = OTHER; note = 2'-O-methyl modified nucleotide
tcctggacaagcatcagatga

SEQ ID NO: 306 - RNA, 21 nt, synthetic construct
  source 1..21: mol_type = other RNA
  modified_base 1: mod_base = OTHER; note = 2'-O-methyl modified nucleotide with 3'-phosphorothioate linkage
  modified_base 2: mod_base = OTHER; note = 2'-O-methyl modified nucleotide with 3'-phosphorothioate linkage
  modified_base 3: mod_base = OTHER; note = 2'-O-methyl modified nucleotide
  modified_base 4: mod_base = OTHER; note = 2'-O-methyl modified nucleotide
  modified_base 5: mod_base = OTHER; note = 2'-O-methyl modified nucleotide
  modified_base 6: mod_base = OTHER; note = 2'-O-methyl modified nucleotide
  modified_base 7: mod_base = OTHER; note = 2'-fluoro modified nucleotide
  modified_base 8: mod_base = OTHER; note = 2'-O-methyl modified nucleotide
  modified_base 9: mod_base = OTHER; note = 2'-fluoro modified nucleotide
  modified_base 10: mod_base = OTHER; note = 2'-fluoro modified nucleotide
  modified_base 11: mod_base = OTHER; note = 2'-fluoro modified nucleotide
  modified_base 12: mod_base = OTHER; note = 2'-O-methyl modified nucleotide
  modified_base 13: mod_base = OTHER; note = 2'-O-methyl modified nucleotide
  modified_base 14: mod_base = OTHER; note = 2'-O-methyl modified nucleotide
  modified_base 15: mod_base = OTHER; note = 2'-O-methyl modified nucleotide
  modified_base 16: mod_base = OTHER; note = 2'-O-methyl modified nucleotide
  modified_base 17: mod_base = OTHER; note = 2'-O-methyl modified nucleotide
  modified_base 18: mod_base = OTHER; note = 2'-O-methyl modified nucleotide
  modified_base 19: mod_base = OTHER; note = 2'-O-methyl modified nucleotide with 3'-phosphorothioate linkage
  modified_base 20: mod_base = OTHER; note = 2'-O-methyl modified nucleotide with 3'-phosphorothioate linkage
  modified_base 21: mod_base = OTHER; note = 2'-O-methyl modified nucleotide
gaagacatcgataagggcatc

SEQ ID NO: 307 - RNA, 21 nt, synthetic construct
  source 1..21: mol_type = other RNA
  modified_base 1: mod_base = OTHER; note = 2'-O-methyl modified nucleotide with 3'-phosphorothioate linkage
  modified_base 2: mod_base = OTHER; note = 2'-O-methyl modified nucleotide with 3'-phosphorothioate linkage
  modified_base 3: mod_base = OTHER; note = 2'-O-methyl modified nucleotide
  modified_base 4: mod_base = OTHER; note = 2'-O-methyl modified nucleotide
  modified_base 5: mod_base = OTHER; note = 2'-O-methyl modified nucleotide
  modified_base 6: mod_base = OTHER; note = 2'-O-methyl modified nucleotide
  modified_base 7: mod_base = OTHER; note = 2'-fluoro modified nucleotide
  modified_base 8: mod_base = OTHER; note = 2'-O-methyl modified nucleotide
  modified_base 9: mod_base = OTHER; note = 2'-fluoro modified nucleotide
  modified_base 10: mod_base = OTHER; note = 2'-fluoro modified nucleotide
  modified_base 11: mod_base = OTHER; note = 2'-fluoro modified nucleotide
  modified_base 12: mod_base = OTHER; note = 2'-O-methyl modified nucleotide
  modified_base 13: mod_base = OTHER; note = 2'-O-methyl modified nucleotide
  modified_base 14: mod_base = OTHER; note = 2'-O-methyl modified nucleotide
  modified_base 15: mod_base = OTHER; note = 2'-O-methyl modified nucleotide
  modified_base 16: mod_base = OTHER; note = 2'-O-methyl modified nucleotide
  modified_base 17: mod_base = OTHER; note = 2'-O-methyl modified nucleotide
  modified_base 18: mod_base = OTHER; note = 2'-O-methyl modified nucleotide
  modified_base 19: mod_base = OTHER; note = 2'-O-methyl modified nucleotide with 3'-phosphorothioate linkage
  modified_base 20: mod_base = OTHER; note = 2'-O-methyl modified nucleotide with 3'-phosphorothioate linkage
  modified_base 21: mod_base = OTHER; note = 2'-O-methyl modified nucleotide
agacatcgataagggcatcct

SEQ ID NO: 308 - RNA, 21 nt, synthetic construct
  source 1..21: mol_type = other RNA
  modified_base 1: mod_base = OTHER; note = 2'-O-methyl modified nucleotide with 3'-phosphorothioate linkage
  modified_base 2: mod_base = OTHER; note = 2'-O-methyl modified nucleotide with 3'-phosphorothioate linkage
  modified_base 3: mod_base = OTHER; note = 2'-O-methyl modified nucleotide
  modified_base 4: mod_base = OTHER; note = 2'-O-methyl modified nucleotide
  modified_base 5: mod_base = OTHER; note = 2'-O-methyl modified nucleotide
  modified_base 6: mod_base = OTHER; note = 2'-O-methyl modified nucleotide
  modified_base 7: mod_base = OTHER; note = 2'-fluoro modified nucleotide
  modified_base 8: mod_base = OTHER; note = 2'-O-methyl modified nucleotide
  modified_base 9: mod_base = OTHER; note = 2'-fluoro modified nucleotide
  modified_base 10: mod_base = OTHER; note = 2'-fluoro modified nucleotide
  modified_base 11: mod_base = OTHER; note = 2'-fluoro modified nucleotide
  modified_base 12: mod_base = OTHER; note = 2'-O-methyl modified nucleotide
  modified_base 13: mod_base = OTHER; note = 2'-O-methyl modified nucleotide
  modified_base 14: mod_base = OTHER; note = 2'-O-methyl modified nucleotide
  modified_base 15: mod_base = OTHER; note = 2'-O-methyl modified nucleotide
  modified_base 16: mod_base = OTHER; note = 2'-O-methyl modified nucleotide
  modified_base 17: mod_base = OTHER; note = 2'-O-methyl modified nucleotide
  modified_base 18: mod_base = OTHER; note = 2'-O-methyl modified nucleotide
  modified_base 19: mod_base = OTHER; note = 2'-O-methyl modified nucleotide with 3'-phosphorothioate linkage
  modified_base 20: mod_base = OTHER; note = 2'-O-methyl modified nucleotide with 3'-phosphorothioate linkage
  modified_base 21: mod_base = OTHER; note = 2'-O-methyl modified nucleotide
gataagggcatccttctcaac

SEQ ID NO: 309 - RNA, 21 nt, synthetic construct
  source 1..21: mol_type = other RNA
  modified_base 1: mod_base = OTHER; note = 2'-O-methyl modified nucleotide with 3'-phosphorothioate linkage
  modified_base 2: mod_base = OTHER; note = 2'-O-methyl modified nucleotide with 3'-phosphorothioate linkage
  modified_base 3: mod_base = OTHER; note = 2'-O-methyl modified nucleotide
  modified_base 4: mod_base = OTHER; note = 2'-O-methyl modified nucleotide
  modified_base 5: mod_base = OTHER; note = 2'-O-methyl modified nucleotide
  modified_base 6: mod_base = OTHER; note = 2'-O-methyl modified nucleotide
  modified_base 7: mod_base = OTHER; note = 2'-fluoro modified nucleotide
  modified_base 8: mod_base = OTHER; note = 2'-O-methyl modified nucleotide
  modified_base 9: mod_base = OTHER; note = 2'-fluoro modified nucleotide
  modified_base 10: mod_base = OTHER; note = 2'-fluoro modified nucleotide
  modified_base 11: mod_base = OTHER; note = 2'-fluoro modified nucleotide
  modified_base 12: mod_base = OTHER; note = 2'-O-methyl modified nucleotide
  modified_base 13: mod_base = OTHER; note = 2'-O-methyl modified nucleotide
  modified_base 14: mod_base = OTHER; note = 2'-O-methyl modified nucleotide
  modified_base 15: mod_base = OTHER; note = 2'-O-methyl modified nucleotide
  modified_base 16: mod_base = OTHER; note = 2'-O-methyl modified nucleotide
  modified_base 17: mod_base = OTHER; note = 2'-O-methyl modified nucleotide
  modified_base 18: mod_base = OTHER; note = 2'-O-methyl modified nucleotide
  modified_base 19: mod_base = OTHER; note = 2'-O-methyl modified nucleotide with 3'-phosphorothioate linkage
  modified_base 20: mod_base = OTHER; note = 2'-O-methyl modified nucleotide with 3'-phosphorothioate linkage
  modified_base 21: mod_base = OTHER; note = 2'-O-methyl modified nucleotide
agggcatccttctcaactgga

SEQ ID NO: 310 - RNA, 21 nt, synthetic construct
  source 1..21: mol_type = other RNA
  modified_base 1: mod_base = OTHER; note = 2'-O-methyl modified nucleotide with 3'-phosphorothioate linkage
  modified_base 2: mod_base = OTHER; note = 2'-O-methyl modified nucleotide with 3'-phosphorothioate linkage
  modified_base 3: mod_base = OTHER; note = 2'-O-methyl modified nucleotide
  modified_base 4: mod_base = OTHER; note = 2'-O-methyl modified nucleotide
  modified_base 5: mod_base = OTHER; note = 2'-O-methyl modified nucleotide
  modified_base 6: mod_base = OTHER; note = 2'-O-methyl modified nucleotide
  modified_base 7: mod_base = OTHER; note = 2'-fluoro modified nucleotide
  modified_base 8: mod_base = OTHER; note = 2'-O-methyl modified nucleotide
  modified_base 9: mod_base = OTHER; note = 2'-fluoro modified nucleotide
  modified_base 10: mod_base = OTHER; note = 2'-fluoro modified nucleotide
  modified_base 11: mod_base = OTHER; note = 2'-fluoro modified nucleotide
  modified_base 12: mod_base = OTHER; note = 2'-O-methyl modified nucleotide
  modified_base 13: mod_base = OTHER; note = 2'-O-methyl modified nucleotide
  modified_base 14: mod_base = OTHER; note = 2'-O-methyl modified nucleotide
  modified_base 15: mod_base = OTHER; note = 2'-O-methyl modified nucleotide
  modified_base 16: mod_base = OTHER; note = 2'-O-methyl modified nucleotide
  modified_base 17: mod_base = OTHER; note = 2'-O-methyl modified nucleotide
  modified_base 18: mod_base = OTHER; note = 2'-O-methyl modified nucleotide
  modified_base 19: mod_base = OTHER; note = 2'-O-methyl modified nucleotide with 3'-phosphorothioate linkage
  modified_base 20: mod_base = OTHER; note = 2'-O-methyl modified nucleotide with 3'-phosphorothioate linkage
  modified_base 21: mod_base = OTHER; note = 2'-O-methyl modified nucleotide
gcatccttctcaactggacca

SEQ ID NO: 311 - RNA, 21 nt, synthetic construct
  source 1..21: mol_type = other RNA
  modified_base 1: mod_base = OTHER; note = 2'-O-methyl modified nucleotide with 3'-phosphorothioate linkage
  modified_base 2: mod_base = OTHER; note = 2'-O-methyl modified nucleotide with 3'-phosphorothioate linkage
  modified_base 3: mod_base = OTHER; note = 2'-O-methyl modified nucleotide
  modified_base 4: mod_base = OTHER; note = 2'-O-methyl modified nucleotide
  modified_base 5: mod_base = OTHER; note = 2'-O-methyl modified nucleotide
  modified_base 6: mod_base = OTHER; note = 2'-O-methyl modified nucleotide
  modified_base 7: mod_base = OTHER; note = 2'-fluoro modified nucleotide
  modified_base 8: mod_base = OTHER; note = 2'-O-methyl modified nucleotide
  modified_base 9: mod_base = OTHER; note = 2'-fluoro modified nucleotide
  modified_base 10: mod_base = OTHER; note = 2'-fluoro modified nucleotide
  modified_base 11: mod_base = OTHER; note = 2'-fluoro modified nucleotide
  modified_base 12: mod_base = OTHER; note = 2'-O-methyl modified nucleotide
  modified_base 13: mod_base = OTHER; note = 2'-O-methyl modified nucleotide
  modified_base 14: mod_base = OTHER; note = 2'-O-methyl modified nucleotide
  modified_base 15: mod_base = OTHER; note = 2'-O-methyl modified nucleotide
  modified_base 16: mod_base = OTHER; note = 2'-O-methyl modified nucleotide
  modified_base 17: mod_base = OTHER; note = 2'-O-methyl modified nucleotide
  modified_base 18: mod_base = OTHER; note = 2'-O-methyl modified nucleotide
  modified_base 19: mod_base = OTHER; note = 2'-O-methyl modified nucleotide with 3'-phosphorothioate linkage
  modified_base 20: mod_base = OTHER; note = 2'-O-methyl modified nucleotide with 3'-phosphorothioate linkage
  modified_base 21: mod_base = OTHER; note = 2'-O-methyl modified nucleotide
caggagcagaagggaacaatg

SEQ ID NO: 312 - RNA, 21 nt, synthetic construct
  source 1..21: mol_type = other RNA
  modified_base 1: mod_base = OTHER; note = 2'-O-methyl modified nucleotide with 3'-phosphorothioate linkage
  modified_base 2: mod_base = OTHER; note = 2'-O-methyl modified nucleotide with 3'-phosphorothioate linkage
  modified_base 3: mod_base = OTHER; note = 2'-O-methyl modified nucleotide
  modified_base 4: mod_base = OTHER; note = 2'-O-methyl modified nucleotide
  modified_base 5: mod_base = OTHER; note = 2'-O-methyl modified nucleotide
  modified_base 6: mod_base = OTHER; note = 2'-O-methyl modified nucleotide
  modified_base 7: mod_base = OTHER; note = 2'-fluoro modified nucleotide
  modified_base 8: mod_base = OTHER; note = 2'-O-methyl modified nucleotide
  modified_base 9: mod_base = OTHER; note = 2'-fluoro modified nucleotide
  modified_base 10: mod_base = OTHER; note = 2'-fluoro modified nucleotide
  modified_base 11: mod_base = OTHER; note = 2'-fluoro modified nucleotide
  modified_base 12: mod_base = OTHER; note = 2'-O-methyl modified nucleotide
  modified_base 13: mod_base = OTHER; note = 2'-O-methyl modified nucleotide
  modified_base 14: mod_base = OTHER; note = 2'-O-methyl modified nucleotide
  modified_base 15: mod_base = OTHER; note = 2'-O-methyl modified nucleotide
  modified_base 16: mod_base = OTHER; note = 2'-O-methyl modified nucleotide
  modified_base 17: mod_base = OTHER; note = 2'-O-methyl modified nucleotide
  modified_base 18: mod_base = OTHER; note = 2'-O-methyl modified nucleotide
  modified_base 19: mod_base = OTHER; note = 2'-O-methyl modified nucleotide with 3'-phosphorothioate linkage
  modified_base 20: mod_base = OTHER; note = 2'-O-methyl modified nucleotide with 3'-phosphorothioate linkage
  modified_base 21: mod_base = OTHER; note = 2'-O-methyl modified nucleotide
ggagcagaagggaacaatgtc

SEQ ID NO: 313 - RNA, 21 nt, synthetic construct
  source 1..21: mol_type = other RNA
  modified_base 1: mod_base = OTHER; note = 2'-O-methyl modified nucleotide with 3'-phosphorothioate linkage
  modified_base 2: mod_base = OTHER; note = 2'-O-methyl modified nucleotide with 3'-phosphorothioate linkage
  modified_base 3: mod_base = OTHER; note = 2'-O-methyl modified nucleotide
  modified_base 4: mod_base = OTHER; note = 2'-O-methyl modified nucleotide
  modified_base 5: mod_base = OTHER; note = 2'-O-methyl modified nucleotide
  modified_base 6: mod_base = OTHER; note = 2'-O-methyl modified nucleotide
  modified_base 7: mod_base = OTHER; note = 2'-fluoro modified nucleotide
  modified_base 8: mod_base = OTHER; note = 2'-O-methyl modified nucleotide
  modified_base 9: mod_base = OTHER; note = 2'-fluoro modified nucleotide
  modified_base 10: mod_base = OTHER; note = 2'-fluoro modified nucleotide
  modified_base 11: mod_base = OTHER; note = 2'-fluoro modified nucleotide
  modified_base 12: mod_base = OTHER; note = 2'-O-methyl modified nucleotide
  modified_base 13: mod_base = OTHER; note = 2'-O-methyl modified nucleotide
  modified_base 14: mod_base = OTHER; note = 2'-O-methyl modified nucleotide
  modified_base 15: mod_base = OTHER; note = 2'-O-methyl modified nucleotide
  modified_base 16: mod_base = OTHER; note = 2'-O-methyl modified nucleotide
  modified_base 17: mod_base = OTHER; note = 2'-O-methyl modified nucleotide
  modified_base 18: mod_base = OTHER; note = 2'-O-methyl modified nucleotide
  modified_base 19: mod_base = OTHER; note = 2'-O-methyl modified nucleotide with 3'-phosphorothioate linkage
  modified_base 20: mod_base = OTHER; note = 2'-O-methyl modified nucleotide with 3'-phosphorothioate linkage
  modified_base 21: mod_base = OTHER; note = 2'-O-methyl modified nucleotide
gagcagaagggaacaatgtcg

SEQ ID NO: 314 - RNA, 21 nt, synthetic construct
  source 1..21: mol_type = other RNA
  modified_base 1: mod_base = OTHER; note = 2'-O-methyl modified nucleotide with 3'-phosphorothioate linkage
  modified_base 2: mod_base = OTHER; note = 2'-O-methyl modified nucleotide with 3'-phosphorothioate linkage
  modified_base 3: mod_base = OTHER; note = 2'-O-methyl modified nucleotide
  modified_base 4: mod_base = OTHER; note = 2'-O-methyl modified nucleotide
  modified_base 5: mod_base = OTHER; note = 2'-O-methyl modified nucleotide
  modified_base 6: mod_base = OTHER; note = 2'-O-methyl modified nucleotide
  modified_base 7: mod_base = OTHER; note = 2'-fluoro modified nucleotide
  modified_base 8: mod_base = OTHER; note = 2'-O-methyl modified nucleotide
  modified_base 9: mod_base = OTHER; note = 2'-fluoro modified nucleotide
  modified_base 10: mod_base = OTHER; note = 2'-fluoro modified nucleotide
  modified_base 11: mod_base = OTHER; note = 2'-fluoro modified nucleotide
  modified_base 12: mod_base = OTHER; note = 2'-O-methyl modified nucleotide
  modified_base 13: mod_base = OTHER; note = 2'-O-methyl modified nucleotide
  modified_base 14: mod_base = OTHER; note = 2'-O-methyl modified nucleotide
  modified_base 15: mod_base = OTHER; note = 2'-O-methyl modified nucleotide
  modified_base 16: mod_base = OTHER; note = 2'-O-methyl modified nucleotide
  modified_base 17: mod_base = OTHER; note = 2'-O-methyl modified nucleotide
  modified_base 18: mod_base = OTHER; note = 2'-O-methyl modified nucleotide
  modified_base 19: mod_base = OTHER; note = 2'-O-methyl modified nucleotide with 3'-phosphorothioate linkage
  modified_base 20: mod_base = OTHER; note = 2'-O-methyl modified nucleotide with 3'-phosphorothioate linkage
  modified_base 21: mod_base = OTHER; note = 2'-O-methyl modified nucleotide
agcagaagggaacaatgtcgt

SEQ ID NO: 315 - RNA, 21 nt, synthetic construct
  source 1..21: mol_type = other RNA
  modified_base 1: mod_base = OTHER; note = 2'-O-methyl modified nucleotide with 3'-phosphorothioate linkage
  modified_base 2: mod_base = OTHER; note = 2'-O-methyl modified nucleotide with 3'-phosphorothioate linkage
  modified_base 3: mod_base = OTHER; note = 2'-O-methyl modified nucleotide
  modified_base 4: mod_base = OTHER; note = 2'-O-methyl modified nucleotide
  modified_base 5: mod_base = OTHER; note = 2'-O-methyl modified nucleotide
  modified_base 6: mod_base = OTHER; note = 2'-O-methyl modified nucleotide
  modified_base 7: mod_base = OTHER; note = 2'-fluoro modified nucleotide
  modified_base 8: mod_base = OTHER; note = 2'-O-methyl modified nucleotide
  modified_base 9: mod_base = OTHER; note = 2'-fluoro modified nucleotide
  modified_base 10: mod_base = OTHER; note = 2'-fluoro modified nucleotide
  modified_base 11: mod_base = OTHER; note = 2'-fluoro modified nucleotide
  modified_base 12: mod_base = OTHER; note = 2'-O-methyl modified nucleotide
  modified_base 13: mod_base = OTHER; note = 2'-O-methyl modified nucleotide
  modified_base 14: mod_base = OTHER; note = 2'-O-methyl modified nucleotide
  modified_base 15: mod_base = OTHER; note = 2'-O-methyl modified nucleotide
  modified_base 16: mod_base = OTHER; note = 2'-O-methyl modified nucleotide
  modified_base 17: mod_base = OTHER; note = 2'-O-methyl modified nucleotide
  modified_base 18: mod_base = OTHER; note = 2'-O-methyl modified nucleotide
  modified_base 19: mod_base = OTHER; note = 2'-O-methyl modified nucleotide with 3'-phosphorothioate linkage
  modified_base 20: mod_base = OTHER; note = 2'-O-methyl modified nucleotide with 3'-phosphorothioate linkage
  modified_base 21: mod_base = OTHER; note = 2'-O-methyl modified nucleotide
cagaagggaacaatgtcgtgg

SEQ ID NO: 316 - RNA, 21 nt, synthetic construct
  source 1..21: mol_type = other RNA
  modified_base 1: mod_base = OTHER; note = 2'-O-methyl modified nucleotide with 3'-phosphorothioate linkage
  modified_base 2: mod_base = OTHER; note = 2'-O-methyl modified nucleotide with 3'-phosphorothioate linkage
  modified_base 3: mod_base = OTHER; note = 2'-O-methyl modified nucleotide
  modified_base 4: mod_base = OTHER; note = 2'-O-methyl modified nucleotide
  modified_base 5: mod_base = OTHER; note = 2'-O-methyl modified nucleotide
  modified_base 6: mod_base = OTHER; note = 2'-O-methyl modified nucleotide
  modified_base 7: mod_base = OTHER; note = 2'-fluoro modified nucleotide
  modified_base 8: mod_base = OTHER; note = 2'-O-methyl modified nucleotide
  modified_base 9: mod_base = OTHER; note = 2'-fluoro modified nucleotide
  modified_base 10: mod_base = OTHER; note = 2'-fluoro modified nucleotide
  modified_base 11: mod_base = OTHER; note = 2'-fluoro modified nucleotide
  modified_base 12: mod_base = OTHER; note = 2'-O-methyl modified nucleotide
  modified_base 13: mod_base = OTHER; note = 2'-O-methyl modified nucleotide
  modified_base 14: mod_base = OTHER; note = 2'-O-methyl modified nucleotide
  modified_base 15: mod_base = OTHER; note = 2'-O-methyl modified nucleotide
  modified_base 16: mod_base = OTHER; note = 2'-O-methyl modified nucleotide
  modified_base 17: mod_base = OTHER; note = 2'-O-methyl modified nucleotide
  modified_base 18: mod_base = OTHER; note = 2'-O-methyl modified nucleotide
  modified_base 19: mod_base = OTHER; note = 2'-O-methyl modified nucleotide with 3'-phosphorothioate linkage
  modified_base 20: mod_base = OTHER; note = 2'-O-methyl modified nucleotide with 3'-phosphorothioate linkage
  modified_base 21: mod_base = OTHER; note = 2'-O-methyl modified nucleotide
agaagggaacaatgtcgtggg

SEQ ID NO: 317 - RNA, 21 nt, synthetic construct
  source 1..21: mol_type = other RNA
  modified_base 1: mod_base = OTHER; note = 2'-O-methyl modified nucleotide with 3'-phosphorothioate linkage
  modified_base 2: mod_base = OTHER; note = 2'-O-methyl modified nucleotide with 3'-phosphorothioate linkage
  modified_base 3: mod_base = OTHER; note = 2'-O-methyl modified nucleotide
  modified_base 4: mod_base = OTHER; note = 2'-O-methyl modified nucleotide
  modified_base 5: mod_base = OTHER; note = 2'-O-methyl modified nucleotide
  modified_base 6: mod_base = OTHER; note = 2'-O-methyl modified nucleotide
  modified_base 7: mod_base = OTHER; note = 2'-fluoro modified nucleotide
  modified_base 8: mod_base = OTHER; note = 2'-O-methyl modified nucleotide
  modified_base 9: mod_base = OTHER; note = 2'-fluoro modified nucleotide
  modified_base 10: mod_base = OTHER; note = 2'-fluoro modified nucleotide
  modified_base 11: mod_base = OTHER; note = 2'-fluoro modified nucleotide
  modified_base 12: mod_base = OTHER; note = 2'-O-methyl modified nucleotide
  modified_base 13: mod_base = OTHER; note = 2'-O-methyl modified nucleotide
  modified_base 14: mod_base = OTHER; note = 2'-O-methyl modified nucleotide
  modified_base 15: mod_base = OTHER; note = 2'-O-methyl modified nucleotide
  modified_base 16: mod_base = OTHER; note = 2'-O-methyl modified nucleotide
  modified_base 17: mod_base = OTHER; note = 2'-O-methyl modified nucleotide
  modified_base 18: mod_base = OTHER; note = 2'-O-methyl modified nucleotide
  modified_base 19: mod_base = OTHER; note = 2'-O-methyl modified nucleotide with 3'-phosphorothioate linkage
  modified_base 20: mod_base = OTHER; note = 2'-O-methyl modified nucleotide with 3'-phosphorothioate linkage
  modified_base 21: mod_base = OTHER; note = 2'-O-methyl modified nucleotide
aatggatgtggtggcaatggt

SEQ ID NO: 318 - RNA, 21 nt, synthetic construct
  source 1..21: mol_type = other RNA
  modified_base 1: mod_base = OTHER; note = 2'-O-methyl modified nucleotide with 3'-phosphorothioate linkage
  modified_base 2: mod_base = OTHER; note = 2'-O-methyl modified nucleotide with 3'-phosphorothioate linkage
  modified_base 3: mod_base = OTHER; note = 2'-O-methyl modified nucleotide
  modified_base 4: mod_base = OTHER; note = 2'-O-methyl modified nucleotide
  modified_base 5: mod_base = OTHER; note = 2'-O-methyl modified nucleotide
  modified_base 6: mod_base = OTHER; note = 2'-O-methyl modified nucleotide
  modified_base 7: mod_base = OTHER; note = 2'-fluoro modified nucleotide
  modified_base 8: mod_base = OTHER; note = 2'-O-methyl modified nucleotide
  modified_base 9: mod_base = OTHER; note = 2'-fluoro modified nucleotide
  modified_base 10: mod_base = OTHER; note = 2'-fluoro modified nucleotide
  modified_base 11: mod_base = OTHER; note = 2'-fluoro modified nucleotide
  modified_base 12: mod_base = OTHER; note = 2'-O-methyl modified nucleotide
  modified_base 13: mod_base = OTHER; note = 2'-O-methyl modified nucleotide
  modified_base 14: mod_base = OTHER; note = 2'-O-methyl modified nucleotide
  modified_base 15: mod_base = OTHER; note = 2'-O-methyl modified nucleotide
  modified_base 16: mod_base = OTHER; note = 2'-O-methyl modified nucleotide
  modified_base 17: mod_base = OTHER; note = 2'-O-methyl modified nucleotide
  modified_base 18: mod_base = OTHER; note = 2'-O-methyl modified nucleotide
  modified_base 19: mod_base = OTHER; note = 2'-O-methyl modified nucleotide with 3'-phosphorothioate linkage
  modified_base 20: mod_base = OTHER; note = 2'-O-methyl modified nucleotide with 3'-phosphorothioate linkage
  modified_base 21: mod_base = OTHER; note = 2'-O-methyl modified nucleotide
gatgtggtggcaatggtgaat

SEQ ID NO: 319 - RNA, 21 nt, synthetic construct
  source 1..21: mol_type = other RNA
  modified_base 1: mod_base = OTHER; note = 2'-O-methyl modified nucleotide with 3'-phosphorothioate linkage
  modified_base 2: mod_base = OTHER; note = 2'-O-methyl modified nucleotide with 3'-phosphorothioate linkage
  modified_base 3: mod_base = OTHER; note = 2'-O-methyl modified nucleotide
  modified_base 4: mod_base = OTHER; note = 2'-O-methyl modified nucleotide
  modified_base 5: mod_base = OTHER; note = 2'-O-methyl modified nucleotide
  modified_base 6: mod_base = OTHER; note = 2'-O-methyl modified nucleotide
  modified_base 7: mod_base = OTHER; note = 2'-fluoro modified nucleotide
  modified_base 8: mod_base = OTHER; note = 2'-O-methyl modified nucleotide
  modified_base 9: mod_base = OTHER; note = 2'-fluoro modified nucleotide
  modified_base 10: mod_base = OTHER; note = 2'-fluoro modified nucleotide
  modified_base 11: mod_base = OTHER; note = 2'-fluoro modified nucleotide
  modified_base 12: mod_base = OTHER; note = 2'-O-methyl modified nucleotide
  modified_base 13: mod_base = OTHER; note = 2'-O-methyl modified nucleotide
  modified_base 14: mod_base = OTHER; note = 2'-O-methyl modified nucleotide
  modified_base 15: mod_base = OTHER; note = 2'-O-methyl modified nucleotide
  modified_base 16: mod_base = OTHER; note = 2'-O-methyl modified nucleotide
  modified_base 17: mod_base = OTHER; note = 2'-O-methyl modified nucleotide
  modified_base 18: mod_base = OTHER; note = 2'-O-methyl modified nucleotide
  modified_base 19: mod_base = OTHER; note = 2'-O-methyl modified nucleotide with 3'-phosphorothioate linkage
  modified_base 20: mod_base = OTHER; note = 2'-O-methyl modified nucleotide with 3'-phosphorothioate linkage
  modified_base 21: mod_base = OTHER; note = 2'-O-methyl modified nucleotide
atgtggtggcaatggtgaatg

SEQ ID NO: 320 - RNA, 21 nt, synthetic construct
  source 1..21: mol_type = other RNA
  modified_base 1: mod_base = OTHER; note = 2'-O-methyl modified nucleotide with 3'-phosphorothioate linkage
  modified_base 2: mod_base = OTHER; note = 2'-O-methyl modified nucleotide with 3'-phosphorothioate linkage
  modified_base 3: mod_base = OTHER; note = 2'-O-methyl modified nucleotide
  modified_base 4: mod_base = OTHER; note = 2'-O-methyl modified nucleotide
  modified_base 5: mod_base = OTHER; note = 2'-O-methyl modified nucleotide
  modified_base 6: mod_base = OTHER; note = 2'-O-methyl modified nucleotide
  modified_base 7: mod_base = OTHER; note = 2'-fluoro modified nucleotide
  modified_base 8: mod_base = OTHER; note = 2'-O-methyl modified nucleotide
  modified_base 9: mod_base = OTHER; note = 2'-fluoro modified nucleotide
  modified_base 10: mod_base = OTHER; note = 2'-fluoro modified nucleotide
  modified_base 11: mod_base = OTHER; note = 2'-fluoro modified nucleotide
  modified_base 12: mod_base = OTHER; note = 2'-O-methyl modified nucleotide
  modified_base 13: mod_base = OTHER; note = 2'-O-methyl modified nucleotide
  modified_base 14: mod_base = OTHER; note = 2'-O-methyl modified nucleotide
  modified_base 15: mod_base = OTHER; note = 2'-O-methyl modified nucleotide
  modified_base 16: mod_base = OTHER; note = 2'-O-methyl modified nucleotide
  modified_base 17: mod_base = OTHER; note = 2'-O-methyl modified nucleotide
  modified_base 18: mod_base = OTHER; note = 2'-O-methyl modified nucleotide
  modified_base 19: mod_base = OTHER; note = 2'-O-methyl modified nucleotide with 3'-phosphorothioate linkage
  modified_base 20: mod_base = OTHER; note = 2'-O-methyl modified nucleotide with 3'-phosphorothioate linkage
  modified_base 21: mod_base = OTHER; note = 2'-O-methyl modified nucleotide
tgtggtggcaatggtgaatga

SEQ ID NO: 321 - RNA, 21 nt, synthetic construct
  source 1..21: mol_type = other RNA
  modified_base 1: mod_base = OTHER; note = 2'-O-methyl modified nucleotide with 3'-phosphorothioate linkage
  modified_base 2: mod_base = OTHER; note = 2'-O-methyl modified nucleotide with 3'-phosphorothioate linkage
  modified_base 3: mod_base = OTHER; note = 2'-O-methyl modified nucleotide
  modified_base 4: mod_base = OTHER; note = 2'-O-methyl modified nucleotide
  modified_base 5: mod_base = OTHER; note = 2'-O-methyl modified nucleotide
  modified_base 6: mod_base = OTHER; note = 2'-O-methyl modified nucleotide
  modified_base 7: mod_base = OTHER; note = 2'-fluoro modified nucleotide
  modified_base 8: mod_base = OTHER; note = 2'-O-methyl modified nucleotide
  modified_base 9: mod_base = OTHER; note = 2'-fluoro modified nucleotide
  modified_base 10: mod_base = OTHER; note = 2'-fluoro modified nucleotide
  modified_base 11: mod_base = OTHER; note = 2'-fluoro modified nucleotide
  modified_base 12: mod_base = OTHER; note = 2'-O-methyl modified nucleotide
  modified_base 13: mod_base = OTHER; note = 2'-O-methyl modified nucleotide
  modified_base 14: mod_base = OTHER; note = 2'-O-methyl modified nucleotide
  modified_base 15: mod_base = OTHER; note = 2'-O-methyl modified nucleotide
  modified_base 16: mod_base = OTHER; note = 2'-O-methyl modified nucleotide
  modified_base 17: mod_base = OTHER; note = 2'-O-methyl modified nucleotide
  modified_base 18: mod_base = OTHER; note = 2'-O-methyl modified nucleotide
  modified_base 19: mod_base = OTHER; note = 2'-O-methyl modified nucleotide with 3'-phosphorothioate linkage
  modified_base 20: mod_base = OTHER; note = 2'-O-methyl modified nucleotide with 3'-phosphorothioate linkage
  modified_base 21: mod_base = OTHER; note = 2'-O-methyl modified nucleotide
ggtggcaatggtgaatgacac

SEQ ID NO: 322 - RNA, 21 nt, synthetic construct
  source 1..21: mol_type = other RNA
  modified_base 1: mod_base = OTHER; note = 2'-O-methyl modified nucleotide with 3'-phosphorothioate linkage
  modified_base 2: mod_base = OTHER; note = 2'-O-methyl modified nucleotide with 3'-phosphorothioate linkage
  modified_base 3: mod_base = OTHER; note = 2'-O-methyl modified nucleotide
  modified_base 4: mod_base = OTHER; note = 2'-O-methyl modified nucleotide
  modified_base 5: mod_base = OTHER; note = 2'-O-methyl modified nucleotide
  modified_base 6: mod_base = OTHER; note = 2'-O-methyl modified nucleotide
  modified_base 7: mod_base = OTHER; note = 2'-fluoro modified nucleotide
  modified_base 8: mod_base = OTHER; note = 2'-O-methyl modified nucleotide
  modified_base 9: mod_base = OTHER; note = 2'-fluoro modified nucleotide
  modified_base 10: mod_base = OTHER; note = 2'-fluoro modified nucleotide
  modified_base 11: mod_base = OTHER; note = 2'-fluoro modified nucleotide
  modified_base 12: mod_base = OTHER; note = 2'-O-methyl modified nucleotide
  modified_base 13: mod_base = OTHER; note = 2'-O-methyl modified nucleotide
  modified_base 14: mod_base = OTHER; note = 2'-O-methyl modified nucleotide
  modified_base 15: mod_base = OTHER; note = 2'-O-methyl modified nucleotide
  modified_base 16: mod_base = OTHER; note = 2'-O-methyl modified nucleotide
  modified_base 17: mod_base = OTHER; note = 2'-O-methyl modified nucleotide
  modified_base 18: mod_base = OTHER; note = 2'-O-methyl modified nucleotide
  modified_base 19: mod_base = OTHER; note = 2'-O-methyl modified nucleotide with 3'-phosphorothioate linkage
  modified_base 20: mod_base = OTHER; note = 2'-O-methyl modified nucleotide with 3'-phosphorothioate linkage
  modified_base 21: mod_base = OTHER; note = 2'-O-methyl modified nucleotide
ggcaatggtgaatgacacggt

SEQ ID NO: 323 - RNA, 21 nt, synthetic construct
  source 1..21: mol_type = other RNA
  modified_base 1: mod_base = OTHER; note = 2'-O-methyl modified nucleotide with 3'-phosphorothioate linkage
  modified_base 2: mod_base = OTHER; note = 2'-O-methyl modified nucleotide with 3'-phosphorothioate linkage
  modified_base 3: mod_base = OTHER; note = 2'-O-methyl modified nucleotide
  modified_base 4: mod_base = OTHER; note = 2'-O-methyl modified nucleotide
  modified_base 5: mod_base = OTHER; note = 2'-O-methyl modified nucleotide
  modified_base 6: mod_base = OTHER; note = 2'-O-methyl modified nucleotide
  modified_base 7: mod_base = OTHER; note = 2'-fluoro modified nucleotide
  modified_base 8: mod_base = OTHER; note = 2'-O-methyl modified nucleotide
  modified_base 9: mod_base = OTHER; note = 2'-fluoro modified nucleotide
  modified_base 10: mod_base = OTHER; note = 2'-fluoro modified nucleotide
  modified_base 11: mod_base = OTHER; note = 2'-fluoro modified nucleotide
  modified_base 12: mod_base = OTHER; note = 2'-O-methyl modified nucleotide
  modified_base 13: mod_base = OTHER; note = 2'-O-methyl modified nucleotide
  modified_base 14: mod_base = OTHER; note = 2'-O-methyl modified nucleotide
  modified_base 15: mod_base = OTHER; note = 2'-O-methyl modified nucleotide
  modified_base 16: mod_base = OTHER; note = 2'-O-methyl modified nucleotide
  modified_base 17: mod_base = OTHER; note = 2'-O-methyl modified nucleotide
  modified_base 18: mod_base = OTHER; note = 2'-O-methyl modified nucleotide
  modified_base 19: mod_base = OTHER; note = 2'-O-methyl modified nucleotide with 3'-phosphorothioate linkage
  modified_base 20: mod_base = OTHER; note = 2'-O-methyl modified nucleotide with 3'-phosphorothioate linkage
  modified_base 21: mod_base = OTHER; note = 2'-O-methyl modified nucleotide
gcaatggtgaatgacacggtg

SEQ ID NO: 324 - RNA, 21 nt, synthetic construct
  source 1..21: mol_type = other RNA
  modified_base 1: mod_base = OTHER; note = 2'-O-methyl modified nucleotide with 3'-phosphorothioate linkage
  modified_base 2: mod_base = OTHER; note = 2'-O-methyl modified nucleotide with 3'-phosphorothioate linkage
  modified_base 3: mod_base = OTHER; note = 2'-O-methyl modified nucleotide
  modified_base 4: mod_base = OTHER; note = 2'-O-methyl modified nucleotide
  modified_base 5: mod_base = OTHER; note = 2'-O-methyl modified nucleotide
  modified_base 6: mod_base = OTHER; note = 2'-O-methyl modified nucleotide
  modified_base 7: mod_base = OTHER; note = 2'-fluoro modified nucleotide
  modified_base 8: mod_base = OTHER; note = 2'-O-methyl modified nucleotide
  modified_base 9: mod_base = OTHER; note = 2'-fluoro modified nucleotide
  modified_base 10: mod_base = OTHER; note = 2'-fluoro modified nucleotide
  modified_base 11: mod_base = OTHER; note = 2'-fluoro modified nucleotide
  modified_base 12: mod_base = OTHER; note = 2'-O-methyl modified nucleotide
  modified_base 13: mod_base = OTHER; note = 2'-O-methyl modified nucleotide
  modified_base 14: mod_base = OTHER; note = 2'-O-methyl modified nucleotide
  modified_base 15: mod_base = OTHER; note = 2'-O-methyl modified nucleotide
  modified_base 16: mod_base = OTHER; note = 2'-O-methyl modified nucleotide
  modified_base 17: mod_base = OTHER; note = 2'-O-methyl modified nucleotide
  modified_base 18: mod_base = OTHER; note = 2'-O-methyl modified nucleotide
  modified_base 19: mod_base = OTHER; note = 2'-O-methyl modified nucleotide with 3'-phosphorothioate linkage
  modified_base 20: mod_base = OTHER; note = 2'-O-methyl modified nucleotide with 3'-phosphorothioate linkage
  modified_base 21: mod_base = OTHER; note = 2'-O-methyl modified nucleotide
atggtgaatgacacggtggcc

SEQ ID NO: 325 - RNA, 21 nt, synthetic construct
  source 1..21: mol_type = other RNA
  modified_base 1: mod_base = OTHER; note = 2'-O-methyl modified nucleotide with 3'-phosphorothioate linkage
  modified_base 2: mod_base = OTHER; note = 2'-O-methyl modified nucleotide with 3'-phosphorothioate linkage
  modified_base 3: mod_base = OTHER; note = 2'-O-methyl modified nucleotide
  modified_base 4: mod_base = OTHER; note = 2'-O-methyl modified nucleotide
  modified_base 5: mod_base = OTHER; note = 2'-O-methyl modified nucleotide
  modified_base 6: mod_base = OTHER; note = 2'-O-methyl modified nucleotide
  modified_base 7: mod_base = OTHER; note = 2'-fluoro modified nucleotide
  modified_base 8: mod_base = OTHER; note = 2'-O-methyl modified nucleotide
  modified_base 9: mod_base = OTHER; note = 2'-fluoro modified nucleotide
  modified_base 10: mod_base = OTHER; note = 2'-fluoro modified nucleotide
  modified_base 11: mod_base = OTHER; note = 2'-fluoro modified nucleotide
  modified_base 12: mod_base = OTHER; note = 2'-O-methyl modified nucleotide
  modified_base 13: mod_base = OTHER; note = 2'-O-methyl modified nucleotide
  modified_base 14: mod_base = OTHER; note = 2'-O-methyl modified nucleotide
  modified_base 15: mod_base = OTHER; note = 2'-O-methyl modified nucleotide
  modified_base 16: mod_base = OTHER; note = 2'-O-methyl modified nucleotide
  modified_base 17: mod_base = OTHER; note = 2'-O-methyl modified nucleotide
  modified_base 18: mod_base = OTHER; note = 2'-O-methyl modified nucleotide
  modified_base 19: mod_base = OTHER; note = 2'-O-methyl modified nucleotide with 3'-phosphorothioate linkage
  modified_base 20: mod_base = OTHER; note = 2'-O-methyl modified nucleotide with 3'-phosphorothioate linkage
  modified_base 21: mod_base = OTHER; note = 2'-O-methyl modified nucleotide
tggtgaatgacacggtggcca

SEQ ID NO: 326 - RNA, 21 nt, synthetic construct
  source 1..21: mol_type = other RNA
  modified_base 1: mod_base = OTHER; note = 2'-O-methyl modified nucleotide with 3'-phosphorothioate linkage
  modified_base 2: mod_base = OTHER; note = 2'-O-methyl modified nucleotide with 3'-phosphorothioate linkage
  modified_base 3: mod_base = OTHER; note = 2'-O-methyl modified nucleotide
  modified_base 4: mod_base = OTHER; note = 2'-O-methyl modified nucleotide
  modified_base 5: mod_base = OTHER; note = 2'-O-methyl modified nucleotide
  modified_base 6: mod_base = OTHER; note = 2'-O-methyl modified nucleotide
  modified_base 7: mod_base = OTHER; note = 2'-fluoro modified nucleotide
  modified_base 8: mod_base = OTHER; note = 2'-O-methyl modified nucleotide
  modified_base 9: mod_base = OTHER; note = 2'-fluoro modified nucleotide
  modified_base 10: mod_base = OTHER; note = 2'-fluoro modified nucleotide
  modified_base 11: mod_base = OTHER; note = 2'-fluoro modified nucleotide
  modified_base 12: mod_base = OTHER; note = 2'-O-methyl modified nucleotide
  modified_base 13: mod_base = OTHER; note = 2'-O-methyl modified nucleotide
  modified_base 14: mod_base = OTHER; note = 2'-O-methyl modified nucleotide
  modified_base 15: mod_base = OTHER; note = 2'-O-methyl modified nucleotide
  modified_base 16: mod_base = OTHER; note = 2'-O-methyl modified nucleotide
  modified_base 17: mod_base = OTHER; note = 2'-O-methyl modified nucleotide
  modified_base 18: mod_base = OTHER; note = 2'-O-methyl modified nucleotide
  modified_base 19: mod_base = OTHER; note = 2'-O-methyl modified nucleotide with 3'-phosphorothioate linkage
  modified_base 20: mod_base = OTHER; note = 2'-O-methyl modified nucleotide with 3'-phosphorothioate linkage
  modified_base 21: mod_base = OTHER; note = 2'-O-methyl modified nucleotide
ccacgatgatctcctgctact

SEQ ID NO: 327 - RNA, 21 nt, synthetic construct
  source 1..21: mol_type = other RNA
  modified_base 1: mod_base = OTHER; note = 2'-O-methyl modified nucleotide with 3'-phosphorothioate linkage
  modified_base 2: mod_base = OTHER; note = 2'-O-methyl modified nucleotide with 3'-phosphorothioate linkage
  modified_base 3: mod_base = OTHER; note = 2'-O-methyl modified nucleotide
  modified_base 4: mod_base = OTHER; note = 2'-O-methyl modified nucleotide
  modified_base 5: mod_base = OTHER; note = 2'-O-methyl modified nucleotide
  modified_base 6: mod_base = OTHER; note = 2'-O-methyl modified nucleotide
  modified_base 7: mod_base = OTHER; note = 2'-fluoro modified nucleotide
  modified_base 8: mod_base = OTHER; note = 2'-O-methyl modified nucleotide
  modified_base 9: mod_base = OTHER; note = 2'-fluoro modified nucleotide
  modified_base 10: mod_base = OTHER; note = 2'-fluoro modified nucleotide
  modified_base 11: mod_base = OTHER; note = 2'-fluoro modified nucleotide
  modified_base 12: mod_base = OTHER; note = 2'-O-methyl modified nucleotide
  modified_base 13: mod_base = OTHER; note = 2'-O-methyl modified nucleotide
  modified_base 14: mod_base = OTHER; note = 2'-O-methyl modified nucleotide
  modified_base 15: mod_base = OTHER; note = 2'-O-methyl modified nucleotide
  modified_base 16: mod_base = OTHER; note = 2'-O-methyl modified nucleotide
  modified_base 17: mod_base = OTHER; note = 2'-O-methyl modified nucleotide
  modified_base 18: mod_base = OTHER; note = 2'-O-methyl modified nucleotide
  modified_base 19: mod_base = OTHER; note = 2'-O-methyl modified nucleotide with 3'-phosphorothioate linkage
  modified_base 20: mod_base = OTHER; note = 2'-O-methyl modified nucleotide with 3'-phosphorothioate linkage
  modified_base 21: mod_base = OTHER; note = 2'-O-methyl modified nucleotide
cacgatgatctcctgctacta

SEQ ID NO: 328 - RNA, 21 nt, synthetic construct
  source 1..21: mol_type = other RNA
  modified_base 1: mod_base = OTHER; note = 2'-O-methyl modified nucleotide with 3'-phosphorothioate linkage
  modified_base 2: mod_base = OTHER; note = 2'-O-methyl modified nucleotide with 3'-phosphorothioate linkage
  modified_base 3: mod_base = OTHER; note = 2'-O-methyl modified nucleotide
  modified_base 4: mod_base = OTHER; note = 2'-O-methyl modified nucleotide
  modified_base 5: mod_base = OTHER; note = 2'-O-methyl modified nucleotide
  modified_base 6: mod_base = OTHER; note = 2'-O-methyl modified nucleotide
  modified_base 7: mod_base = OTHER; note = 2'-fluoro modified nucleotide
  modified_base 8: mod_base = OTHER; note = 2'-O-methyl modified nucleotide
  modified_base 9: mod_base = OTHER; note = 2'-fluoro modified nucleotide
  modified_base 10: mod_base = OTHER; note = 2'-fluoro modified nucleotide
  modified_base 11: mod_base = OTHER; note = 2'-fluoro modified nucleotide
  modified_base 12: mod_base = OTHER; note = 2'-O-methyl modified nucleotide
  modified_base 13: mod_base = OTHER; note = 2'-O-methyl modified nucleotide
  modified_base 14: mod_base = OTHER; note = 2'-O-methyl modified nucleotide
  modified_base 15: mod_base = OTHER; note = 2'-O-methyl modified nucleotide
  modified_base 16: mod_base = OTHER; note = 2'-O-methyl modified nucleotide
  modified_base 17: mod_base = OTHER; note = 2'-O-methyl modified nucleotide
  modified_base 18: mod_base = OTHER; note = 2'-O-methyl modified nucleotide
  modified_base 19: mod_base = OTHER; note = 2'-O-methyl modified nucleotide with 3'-phosphorothioate linkage
  modified_base 20: mod_base = OTHER; note = 2'-O-methyl modified nucleotide with 3'-phosphorothioate linkage
  modified_base 21: mod_base = OTHER; note = 2'-O-methyl modified nucleotide
acgatgatctcctgctactac

SEQ ID NO: 329 - RNA, 21 nt, synthetic construct
  source 1..21: mol_type = other RNA
  modified_base 1: mod_base = OTHER; note = 2'-O-methyl modified nucleotide with 3'-phosphorothioate linkage
  modified_base 2: mod_base = OTHER; note = 2'-O-methyl modified nucleotide with 3'-phosphorothioate linkage
  modified_base 3: mod_base = OTHER; note = 2'-O-methyl modified nucleotide
  modified_base 4: mod_base = OTHER; note = 2'-O-methyl modified nucleotide
  modified_base 5: mod_base = OTHER; note = 2'-O-methyl modified nucleotide
  modified_base 6: mod_base = OTHER; note = 2'-O-methyl modified nucleotide
  modified_base 7: mod_base = OTHER; note = 2'-fluoro modified nucleotide
  modified_base 8: mod_base = OTHER; note = 2'-O-methyl modified nucleotide
  modified_base 9: mod_base = OTHER; note = 2'-fluoro modified nucleotide
  modified_base 10: mod_base = OTHER; note = 2'-fluoro modified nucleotide
  modified_base 11: mod_base = OTHER; note = 2'-fluoro modified nucleotide
  modified_base 12: mod_base = OTHER; note = 2'-O-methyl modified nucleotide
  modified_base 13: mod_base = OTHER; note = 2'-O-methyl modified nucleotide
  modified_base 14: mod_base = OTHER; note = 2'-O-methyl modified nucleotide
  modified_base 15: mod_base = OTHER; note = 2'-O-methyl modified nucleotide
  modified_base 16: mod_base = OTHER; note = 2'-O-methyl modified nucleotide
  modified_base 17: mod_base = OTHER; note = 2'-O-methyl modified nucleotide
  modified_base 18: mod_base = OTHER; note = 2'-O-methyl modified nucleotide
  modified_base 19: mod_base = OTHER; note = 2'-O-methyl modified nucleotide with 3'-phosphorothioate linkage
  modified_base 20: mod_base = OTHER; note = 2'-O-methyl modified nucleotide with 3'-phosphorothioate linkage
  modified_base 21: mod_base = OTHER; note = 2'-O-methyl modified nucleotide
cgatgatctcctgctactacg

SEQ ID NO: 330 - RNA, 21 nt, synthetic construct
  source 1..21: mol_type = other RNA
  modified_base 1: mod_base = OTHER; note = 2'-O-methyl modified nucleotide with 3'-phosphorothioate linkage
  modified_base 2: mod_base = OTHER; note = 2'-O-methyl modified nucleotide with 3'-phosphorothioate linkage
  modified_base 3: mod_base = OTHER; note = 2'-O-methyl modified nucleotide
  modified_base 4: mod_base = OTHER; note = 2'-O-methyl modified nucleotide
  modified_base 5: mod_base = OTHER; note = 2'-O-methyl modified nucleotide
  modified_base 6: mod_base = OTHER; note = 2'-O-methyl modified nucleotide
  modified_base 7: mod_base = OTHER; note = 2'-fluoro modified nucleotide
  modified_base 8: mod_base = OTHER; note = 2'-O-methyl modified nucleotide
  modified_base 9: mod_base = OTHER; note = 2'-fluoro modified nucleotide
  modified_base 10: mod_base = OTHER; note = 2'-fluoro modified nucleotide
  modified_base 11: mod_base = OTHER; note = 2'-fluoro modified nucleotide
  modified_base 12: mod_base = OTHER; note = 2'-O-methyl modified nucleotide
  modified_base 13: mod_base = OTHER; note = 2'-O-methyl modified nucleotide
  modified_base 14: mod_base = OTHER; note = 2'-O-methyl modified nucleotide
  modified_base 15: mod_base = OTHER; note = 2'-O-methyl modified nucleotide
  modified_base 16: mod_base = OTHER; note = 2'-O-methyl modified nucleotide
  modified_base 17: mod_base = OTHER; note = 2'-O-methyl modified nucleotide
  modified_base 18: mod_base = OTHER; note = 2'-O-methyl modified nucleotide
  modified_base 19: mod_base = OTHER; note = 2'-O-methyl modified nucleotide with 3'-phosphorothioate linkage
  modified_base 20: mod_base = OTHER; note = 2'-O-methyl modified nucleotide with 3'-phosphorothioate linkage
  modified_base 21: mod_base = OTHER; note = 2'-O-methyl modified nucleotide
gatgatctcctgctactacga

SEQ ID NO: 331 - RNA, 21 nt, synthetic construct
  source 1..21: mol_type = other RNA
  modified_base 1: mod_base = OTHER; note = 2'-O-methyl modified nucleotide with 3'-phosphorothioate linkage
  modified_base 2: mod_base = OTHER; note = 2'-O-methyl modified nucleotide with 3'-phosphorothioate linkage
  modified_base 3: mod_base = OTHER; note = 2'-O-methyl modified nucleotide
  modified_base 4: mod_base = OTHER; note = 2'-O-methyl modified nucleotide
  modified_base 5: mod_base = OTHER; note = 2'-O-methyl modified nucleotide
  modified_base 6: mod_base = OTHER; note = 2'-O-methyl modified nucleotide
  modified_base 7: mod_base = OTHER; note = 2'-fluoro modified nucleotide
  modified_base 8: mod_base = OTHER; note = 2'-O-methyl modified nucleotide
  modified_base 9: mod_base = OTHER; note = 2'-fluoro modified nucleotide
  modified_base 10: mod_base = OTHER; note = 2'-fluoro modified nucleotide
  modified_base 11: mod_base = OTHER; note = 2'-fluoro modified nucleotide
  modified_base 12: mod_base = OTHER; note = 2'-O-methyl modified nucleotide
  modified_base 13: mod_base = OTHER; note = 2'-O-methyl modified nucleotide
  modified_base 14: mod_base = OTHER; note = 2'-O-methyl modified nucleotide
  modified_base 15: mod_base = OTHER; note = 2'-O-methyl modified nucleotide
  modified_base 16: mod_base = OTHER; note = 2'-O-methyl modified nucleotide
  modified_base 17: mod_base = OTHER; note = 2'-O-methyl modified nucleotide
  modified_base 18: mod_base = OTHER; note = 2'-O-methyl modified nucleotide
  modified_base 19: mod_base = OTHER; note = 2'-O-methyl modified nucleotide with 3'-phosphorothioate linkage
  modified_base 20: mod_base = OTHER; note = 2'-O-methyl modified nucleotide with 3'-phosphorothioate linkage
  modified_base 21: mod_base = OTHER; note = 2'-O-methyl modified nucleotide
tgatctcctgctactacgaag

SEQ ID NO: 332 - RNA, 21 nt, synthetic construct
  source 1..21: mol_type = other RNA
  modified_base 1: mod_base = OTHER; note = 2'-O-methyl modified nucleotide with 3'-phosphorothioate linkage
  modified_base 2: mod_base = OTHER; note = 2'-O-methyl modified nucleotide with 3'-phosphorothioate linkage
  modified_base 3: mod_base = OTHER; note = 2'-O-methyl modified nucleotide
  modified_base 4: mod_base = OTHER; note = 2'-O-methyl modified nucleotide
  modified_base 5: mod_base = OTHER; note = 2'-O-methyl modified nucleotide
  modified_base 6: mod_base = OTHER; note = 2'-O-methyl modified nucleotide
  modified_base 7: mod_base = OTHER; note = 2'-fluoro modified nucleotide
  modified_base 8: mod_base = OTHER; note = 2'-O-methyl modified nucleotide
  modified_base 9: mod_base = OTHER; note = 2'-fluoro modified nucleotide
  modified_base 10: mod_base = OTHER; note = 2'-fluoro modified nucleotide
  modified_base 11: mod_base = OTHER; note = 2'-fluoro modified nucleotide
  modified_base 12: mod_base = OTHER; note = 2'-O-methyl modified nucleotide
  modified_base 13: mod_base = OTHER; note = 2'-O-methyl modified nucleotide
  modified_base 14: mod_base = OTHER; note = 2'-O-methyl modified nucleotide
  modified_base 15: mod_base = OTHER; note = 2'-O-methyl modified nucleotide
  modified_base 16: mod_base = OTHER; note = 2'-O-methyl modified nucleotide
  modified_base 17: mod_base = OTHER; note = 2'-O-methyl modified nucleotide
  modified_base 18: mod_base = OTHER; note = 2'-O-methyl modified nucleotide
  modified_base 19: mod_base = OTHER; note = 2'-O-methyl modified nucleotide with 3'-phosphorothioate linkage
  modified_base 20: mod_base = OTHER; note = 2'-O-methyl modified nucleotide with 3'-phosphorothioate linkage
  modified_base 21: mod_base = OTHER; note = 2'-O-methyl modified nucleotide
gatctcctgctactacgaaga

SEQ ID NO: 333 - RNA, 21 nt, synthetic construct
  source 1..21: mol_type = other RNA
  modified_base 1: mod_base = OTHER; note = 2'-O-methyl modified nucleotide with 3'-phosphorothioate linkage
  modified_base 2: mod_base = OTHER; note = 2'-O-methyl modified nucleotide with 3'-phosphorothioate linkage
  modified_base 3: mod_base = OTHER; note = 2'-O-methyl modified nucleotide
  modified_base 4: mod_base = OTHER; note = 2'-O-methyl modified nucleotide
  modified_base 5: mod_base = OTHER; note = 2'-O-methyl modified nucleotide
  modified_base 6: mod_base = OTHER; note = 2'-O-methyl modified nucleotide
  modified_base 7: mod_base = OTHER; note = 2'-fluoro modified nucleotide
  modified_base 8: mod_base = OTHER; note = 2'-O-methyl modified nucleotide
  modified_base 9: mod_base = OTHER; note = 2'-fluoro modified nucleotide
  modified_base 10: mod_base = OTHER; note = 2'-fluoro modified nucleotide
  modified_base 11: mod_base = OTHER; note = 2'-fluoro modified nucleotide
  modified_base 12: mod_base = OTHER; note = 2'-O-methyl modified nucleotide
  modified_base 13: mod_base = OTHER; note = 2'-O-methyl modified nucleotide
  modified_base 14: mod_base = OTHER; note = 2'-O-methyl modified nucleotide
  modified_base 15: mod_base = OTHER; note = 2'-O-methyl modified nucleotide
  modified_base 16: mod_base = OTHER; note = 2'-O-methyl modified nucleotide
  modified_base 17: mod_base = OTHER; note = 2'-O-methyl modified nucleotide
  modified_base 18: mod_base = OTHER; note = 2'-O-methyl modified nucleotide
  modified_base 19: mod_base = OTHER; note = 2'-O-methyl modified nucleotide with 3'-phosphorothioate linkage
  modified_base 20: mod_base = OTHER; note = 2'-O-methyl modified nucleotide with 3'-phosphorothioate linkage
  modified_base 21: mod_base = OTHER; note = 2'-O-methyl modified nucleotide
ctactacgaagaccatcagtg

SEQ ID NO: 334 - RNA, 21 nt, synthetic construct
  source 1..21: mol_type = other RNA
  modified_base 1: mod_base = OTHER; note = 2'-O-methyl modified nucleotide with 3'-phosphorothioate linkage
  modified_base 2: mod_base = OTHER; note = 2'-O-methyl modified nucleotide with 3'-phosphorothioate linkage
  modified_base 3: mod_base = OTHER; note = 2'-O-methyl modified nucleotide
  modified_base 4: mod_base = OTHER; note = 2'-O-methyl modified nucleotide
  modified_base 5: mod_base = OTHER; note = 2'-O-methyl modified nucleotide
  modified_base 6: mod_base = OTHER; note = 2'-O-methyl modified nucleotide
  modified_base 7: mod_base = OTHER; note = 2'-fluoro modified nucleotide
  modified_base 8: mod_base = OTHER; note = 2'-O-methyl modified nucleotide
  modified_base 9: mod_base = OTHER; note = 2'-fluoro modified nucleotide
  modified_base 10: mod_base = OTHER; note = 2'-fluoro modified nucleotide
  modified_base 11: mod_base = OTHER; note = 2'-fluoro modified nucleotide
  modified_base 12: mod_base = OTHER; note = 2'-O-methyl modified nucleotide
  modified_base 13: mod_base = OTHER; note = 2'-O-methyl modified nucleotide
  modified_base 14: mod_base = OTHER; note = 2'-O-methyl modified nucleotide
  modified_base 15: mod_base = OTHER; note = 2'-O-methyl modified nucleotide
  modified_base 16: mod_base = OTHER; note = 2'-O-methyl modified nucleotide
  modified_base 17: mod_base = OTHER; note = 2'-O-methyl modified nucleotide
  modified_base 18: mod_base = OTHER; note = 2'-O-methyl modified nucleotide
  modified_base 19: mod_base = OTHER; note = 2'-O-methyl modified nucleotide with 3'-phosphorothioate linkage
  modified_base 20: mod_base = OTHER; note = 2'-O-methyl modified nucleotide with 3'-phosphorothioate linkage
  modified_base 21: mod_base = OTHER; note = 2'-O-methyl modified nucleotide
tactacgaagaccatcagtgc

SEQ ID NO: 335 - RNA, 21 nt, synthetic construct
  source 1..21: mol_type = other RNA
  modified_base 1: mod_base = OTHER; note = 2'-O-methyl modified nucleotide with 3'-phosphorothioate linkage
  modified_base 2: mod_base = OTHER; note = 2'-O-methyl modified nucleotide with 3'-phosphorothioate linkage
  modified_base 3: mod_base = OTHER; note = 2'-O-methyl modified nucleotide
  modified_base 4: mod_base = OTHER; note = 2'-O-methyl modified nucleotide
  modified_base 5: mod_base = OTHER; note = 2'-O-methyl modified nucleotide
  modified_base 6: mod_base = OTHER; note = 2'-O-methyl modified nucleotide
  modified_base 7: mod_base = OTHER; note = 2'-fluoro modified nucleotide
  modified_base 8: mod_base = OTHER; note = 2'-O-methyl modified nucleotide
  modified_base 9: mod_base = OTHER; note = 2'-fluoro modified nucleotide
  modified_base 10: mod_base = OTHER; note = 2'-fluoro modified nucleotide
  modified_base 11: mod_base = OTHER; note = 2'-fluoro modified nucleotide
  modified_base 12: mod_base = OTHER; note = 2'-O-methyl modified nucleotide
  modified_base 13: mod_base = OTHER; note = 2'-O-methyl modified nucleotide
  modified_base 14: mod_base = OTHER; note = 2'-O-methyl modified nucleotide
  modified_base 15: mod_base = OTHER; note = 2'-O-methyl modified nucleotide
  modified_base 16: mod_base = OTHER; note = 2'-O-methyl modified nucleotide
  modified_base 17: mod_base = OTHER; note = 2'-O-methyl modified nucleotide
  modified_base 18: mod_base = OTHER; note = 2'-O-methyl modified nucleotide
  modified_base 19: mod_base = OTHER; note = 2'-O-methyl modified nucleotide with 3'-phosphorothioate linkage
  modified_base 20: mod_base = OTHER; note = 2'-O-methyl modified nucleotide with 3'-phosphorothioate linkage
  modified_base 21: mod_base = OTHER; note = 2'-O-methyl modified nucleotide
tacgaagaccatcagtgcgag

SEQ ID NO: 336 - RNA, 21 nt, synthetic construct
  source 1..21: mol_type = other RNA
  modified_base 1: mod_base = OTHER; note = 2'-O-methyl modified nucleotide with 3'-phosphorothioate linkage
  modified_base 2: mod_base = OTHER; note = 2'-O-methyl modified nucleotide with 3'-phosphorothioate linkage
  modified_base 3: mod_base = OTHER; note = 2'-O-methyl modified nucleotide
  modified_base 4: mod_base = OTHER; note = 2'-O-methyl modified nucleotide
  modified_base 5: mod_base = OTHER; note = 2'-O-methyl modified nucleotide
  modified_base 6: mod_base = OTHER; note = 2'-O-methyl modified nucleotide
  modified_base 7: mod_base = OTHER; note = 2'-fluoro modified nucleotide
  modified_base 8: mod_base = OTHER; note = 2'-O-methyl modified nucleotide
  modified_base 9: mod_base = OTHER; note = 2'-fluoro modified nucleotide
  modified_base 10: mod_base = OTHER; note = 2'-fluoro modified nucleotide
  modified_base 11: mod_base = OTHER; note = 2'-fluoro modified nucleotide
  modified_base 12: mod_base = OTHER; note = 2'-O-methyl modified nucleotide
  modified_base 13: mod_base = OTHER; note = 2'-O-methyl modified nucleotide
  modified_base 14: mod_base = OTHER; note = 2'-O-methyl modified nucleotide
  modified_base 15: mod_base = OTHER; note = 2'-O-methyl modified nucleotide
  modified_base 16: mod_base = OTHER; note = 2'-O-methyl modified nucleotide
  modified_base 17: mod_base = OTHER; note = 2'-O-methyl modified nucleotide
  modified_base 18: mod_base = OTHER; note = 2'-O-methyl modified nucleotide
  modified_base 19: mod_base = OTHER; note = 2'-O-methyl modified nucleotide with 3'-phosphorothioate linkage
  modified_base 20: mod_base = OTHER; note = 2'-O-methyl modified nucleotide with 3'-phosphorothioate linkage
  modified_base 21: mod_base = OTHER; note = 2'-O-methyl modified nucleotide
gaagaccatcagtgcgaggtc

SEQ ID NO: 337 - RNA, 21 nt, synthetic construct
  source 1..21: mol_type = other RNA
  modified_base 1: mod_base = OTHER; note = 2'-O-methyl modified nucleotide with 3'-phosphorothioate linkage
  modified_base 2: mod_base = OTHER; note = 2'-O-methyl modified nucleotide with 3'-phosphorothioate linkage
  modified_base 3: mod_base = OTHER; note = 2'-O-methyl modified nucleotide
  modified_base 4: mod_base = OTHER; note = 2'-O-methyl modified nucleotide
  modified_base 5: mod_base = OTHER; note = 2'-O-methyl modified nucleotide
  modified_base 6: mod_base = OTHER; note = 2'-O-methyl modified nucleotide
  modified_base 7: mod_base = OTHER; note = 2'-fluoro modified nucleotide
  modified_base 8: mod_base = OTHER; note = 2'-O-methyl modified nucleotide
  modified_base 9: mod_base = OTHER; note = 2'-fluoro modified nucleotide
  modified_base 10: mod_base = OTHER; note = 2'-fluoro modified nucleotide
  modified_base 11: mod_base = OTHER; note = 2'-fluoro modified nucleotide
  modified_base 12: mod_base = OTHER; note = 2'-O-methyl modified nucleotide
  modified_base 13: mod_base = OTHER; note = 2'-O-methyl modified nucleotide
  modified_base 14: mod_base = OTHER; note = 2'-O-methyl modified nucleotide
  modified_base 15: mod_base = OTHER; note = 2'-O-methyl modified nucleotide
  modified_base 16: mod_base = OTHER; note = 2'-O-methyl modified nucleotide
  modified_base 17: mod_base = OTHER; note = 2'-O-methyl modified nucleotide
  modified_base 18: mod_base = OTHER; note = 2'-O-methyl modified nucleotide
  modified_base 19: mod_base = OTHER; note = 2'-O-methyl modified nucleotide with 3'-phosphorothioate linkage
  modified_base 20: mod_base = OTHER; note = 2'-O-methyl modified nucleotide with 3'-phosphorothioate linkage
  modified_base 21: mod_base = OTHER; note = 2'-O-methyl modified nucleotide
agaccatcagtgcgaggtcgg

SEQ ID NO: 338 - RNA, 21 nt, synthetic construct
  source 1..21: mol_type = other RNA
  modified_base 1: mod_base = OTHER; note = 2'-O-methyl modified nucleotide with 3'-phosphorothioate linkage
  modified_base 2: mod_base = OTHER; note = 2'-O-methyl modified nucleotide with 3'-phosphorothioate linkage
  modified_base 3: mod_base = OTHER; note = 2'-O-methyl modified nucleotide
  modified_base 4: mod_base = OTHER; note = 2'-O-methyl modified nucleotide
  modified_base 5: mod_base = OTHER; note = 2'-O-methyl modified nucleotide
  modified_base 6: mod_base = OTHER; note = 2'-O-methyl modified nucleotide
  modified_base 7: mod_base = OTHER; note = 2'-fluoro modified nucleotide
  modified_base 8: mod_base = OTHER; note = 2'-O-methyl modified nucleotide
  modified_base 9: mod_base = OTHER; note = 2'-fluoro modified nucleotide
  modified_base 10: mod_base = OTHER; note = 2'-fluoro modified nucleotide
  modified_base 11: mod_base = OTHER; note = 2'-fluoro modified nucleotide
  modified_base 12: mod_base = OTHER; note = 2'-O-methyl modified nucleotide
  modified_base 13: mod_base = OTHER; note = 2'-O-methyl modified nucleotide
  modified_base 14: mod_base = OTHER; note = 2'-O-methyl modified nucleotide
  modified_base 15: mod_base = OTHER; note = 2'-O-methyl modified nucleotide
  modified_base 16: mod_base = OTHER; note = 2'-O-methyl modified nucleotide
  modified_base 17: mod_base = OTHER; note = 2'-O-methyl modified nucleotide
  modified_base 18: mod_base = OTHER; note = 2'-O-methyl modified nucleotide
  modified_base 19: mod_base = OTHER; note = 2'-O-methyl modified nucleotide with 3'-phosphorothioate linkage
  modified_base 20: mod_base = OTHER; note = 2'-O-methyl modified nucleotide with 3'-phosphorothioate linkage
  modified_base 21: mod_base = OTHER; note = 2'-O-methyl modified nucleotide
accatcagtgcgaggtcggca

SEQ ID NO: 339 - RNA, 21 nt, synthetic construct
  source 1..21: mol_type = other RNA
  modified_base 1: mod_base = OTHER; note = 2'-O-methyl modified nucleotide with 3'-phosphorothioate linkage
  modified_base 2: mod_base = OTHER; note = 2'-O-methyl modified nucleotide with 3'-phosphorothioate linkage
  modified_base 3: mod_base = OTHER; note = 2'-O-methyl modified nucleotide
  modified_base 4: mod_base = OTHER; note = 2'-O-methyl modified nucleotide
  modified_base 5: mod_base = OTHER; note = 2'-O-methyl modified nucleotide
  modified_base 6: mod_base = OTHER; note = 2'-O-methyl modified nucleotide
  modified_base 7: mod_base = OTHER; note = 2'-fluoro modified nucleotide
  modified_base 8: mod_base = OTHER; note = 2'-O-methyl modified nucleotide
  modified_base 9: mod_base = OTHER; note = 2'-fluoro modified nucleotide
  modified_base 10: mod_base = OTHER; note = 2'-fluoro modified nucleotide
  modified_base 11: mod_base = OTHER; note = 2'-fluoro modified nucleotide
  modified_base 12: mod_base = OTHER; note = 2'-O-methyl modified nucleotide
  modified_base 13: mod_base = OTHER; note = 2'-O-methyl modified nucleotide
  modified_base 14: mod_base = OTHER; note = 2'-O-methyl modified nucleotide
  modified_base 15: mod_base = OTHER; note = 2'-O-methyl modified nucleotide
  modified_base 16: mod_base = OTHER; note = 2'-O-methyl modified nucleotide
  modified_base 17: mod_base = OTHER; note = 2'-O-methyl modified nucleotide
  modified_base 18: mod_base = OTHER; note = 2'-O-methyl modified nucleotide
  modified_base 19: mod_base = OTHER; note = 2'-O-methyl modified nucleotide with 3'-phosphorothioate linkage
  modified_base 20: mod_base = OTHER; note = 2'-O-methyl modified nucleotide with 3'-phosphorothioate linkage
  modified_base 21: mod_base = OTHER; note = 2'-O-methyl modified nucleotide
catcagtgcgaggtcggcatg

SEQ ID NO: 340 - RNA, 21 nt, synthetic construct
  source 1..21: mol_type = other RNA
  modified_base 1: mod_base = OTHER; note = 2'-O-methyl modified nucleotide with 3'-phosphorothioate linkage
  modified_base 2: mod_base = OTHER; note = 2'-O-methyl modified nucleotide with 3'-phosphorothioate linkage
  modified_base 3: mod_base = OTHER; note = 2'-O-methyl modified nucleotide
  modified_base 4: mod_base = OTHER; note = 2'-O-methyl modified nucleotide
  modified_base 5: mod_base = OTHER; note = 2'-O-methyl modified nucleotide
  modified_base 6: mod_base = OTHER; note = 2'-O-methyl modified nucleotide
  modified_base 7: mod_base = OTHER; note = 2'-fluoro modified nucleotide
  modified_base 8: mod_base = OTHER; note = 2'-O-methyl modified nucleotide
  modified_base 9: mod_base = OTHER; note = 2'-fluoro modified nucleotide
  modified_base 10: mod_base = OTHER; note = 2'-fluoro modified nucleotide
  modified_base 11: mod_base = OTHER; note = 2'-fluoro modified nucleotide
  modified_base 12: mod_base = OTHER; note = 2'-O-methyl modified nucleotide
  modified_base 13: mod_base = OTHER; note = 2'-O-methyl modified nucleotide
  modified_base 14: mod_base = OTHER; note = 2'-O-methyl modified nucleotide
  modified_base 15: mod_base = OTHER; note = 2'-O-methyl modified nucleotide
  modified_base 16: mod_base = OTHER; note = 2'-O-methyl modified nucleotide
  modified_base 17: mod_base = OTHER; note = 2'-O-methyl modified nucleotide
  modified_base 18: mod_base = OTHER; note = 2'-O-methyl modified nucleotide
  modified_base 19: mod_base = OTHER; note = 2'-O-methyl modified nucleotide with 3'-phosphorothioate linkage
  modified_base 20: mod_base = OTHER; note = 2'-O-methyl modified nucleotide with 3'-phosphorothioate linkage
  modified_base 21: mod_base = OTHER; note = 2'-O-methyl modified nucleotide
tcagtgcgaggtcggcatgat

SEQ ID NO: 341 - RNA, 21 nt, synthetic construct
  source 1..21: mol_type = other RNA
  modified_base 1: mod_base = OTHER; note = 2'-O-methyl modified nucleotide with 3'-phosphorothioate linkage
  modified_base 2: mod_base = OTHER; note = 2'-O-methyl modified nucleotide with 3'-phosphorothioate linkage
  modified_base 3: mod_base = OTHER; note = 2'-O-methyl modified nucleotide
  modified_base 4: mod_base = OTHER; note = 2'-O-methyl modified nucleotide
  modified_base 5: mod_base = OTHER; note = 2'-O-methyl modified nucleotide
  modified_base 6: mod_base = OTHER; note = 2'-O-methyl modified nucleotide
  modified_base 7: mod_base = OTHER; note = 2'-fluoro modified nucleotide
  modified_base 8: mod_base = OTHER; note = 2'-O-methyl modified nucleotide
  modified_base 9: mod_base = OTHER; note = 2'-fluoro modified nucleotide
  modified_base 10: mod_base = OTHER; note = 2'-fluoro modified nucleotide
  modified_base 11: mod_base = OTHER; note = 2'-fluoro modified nucleotide
  modified_base 12: mod_base = OTHER; note = 2'-O-methyl modified nucleotide
  modified_base 13: mod_base = OTHER; note = 2'-O-methyl modified nucleotide
  modified_base 14: mod_base = OTHER; note = 2'-O-methyl modified nucleotide
  modified_base 15: mod_base = OTHER; note = 2'-O-methyl modified nucleotide
  modified_base 16: mod_base = OTHER; note = 2'-O-methyl modified nucleotide
  modified_base 17: mod_base = OTHER; note = 2'-O-methyl modified nucleotide
  modified_base 18: mod_base = OTHER; note = 2'-O-methyl modified nucleotide
  modified_base 19: mod_base = OTHER; note = 2'-O-methyl modified nucleotide with 3'-phosphorothioate linkage
  modified_base 20: mod_base = OTHER; note = 2'-O-methyl modified nucleotide with 3'-phosphorothioate linkage
  modified_base 21: mod_base = OTHER; note = 2'-O-methyl modified nucleotide
tggaggagatgcagaatgtgg

SEQ ID NO: 342 - RNA, 21 nt, synthetic construct
  source 1..21: mol_type = other RNA
  modified_base 1: mod_base = OTHER; note = 2'-O-methyl modified nucleotide with 3'-phosphorothioate linkage
  modified_base 2: mod_base = OTHER; note = 2'-O-methyl modified nucleotide with 3'-phosphorothioate linkage
  modified_base 3: mod_base = OTHER; note = 2'-O-methyl modified nucleotide
  modified_base 4: mod_base = OTHER; note = 2'-O-methyl modified nucleotide
  modified_base 5: mod_base = OTHER; note = 2'-O-methyl modified nucleotide
  modified_base 6: mod_base = OTHER; note = 2'-O-methyl modified nucleotide
  modified_base 7: mod_base = OTHER; note = 2'-fluoro modified nucleotide
  modified_base 8: mod_base = OTHER; note = 2'-O-methyl modified nucleotide
  modified_base 9: mod_base = OTHER; note = 2'-fluoro modified nucleotide
  modified_base 10: mod_base = OTHER; note = 2'-fluoro modified nucleotide
  modified_base 11: mod_base = OTHER; note = 2'-fluoro modified nucleotide
  modified_base 12: mod_base = OTHER; note = 2'-O-methyl modified nucleotide
  modified_base 13: mod_base = OTHER; note = 2'-O-methyl modified nucleotide
  modified_base 14: mod_base = OTHER; note = 2'-O-methyl modified nucleotide
  modified_base 15: mod_base = OTHER; note = 2'-O-methyl modified nucleotide
  modified_base 16: mod_base = OTHER; note = 2'-O-methyl modified nucleotide
  modified_base 17: mod_base = OTHER; note = 2'-O-methyl modified nucleotide
  modified_base 18: mod_base = OTHER; note = 2'-O-methyl modified nucleotide
  modified_base 19: mod_base = OTHER; note = 2'-O-methyl modified nucleotide with 3'-phosphorothioate linkage
  modified_base 20: mod_base = OTHER; note = 2'-O-methyl modified nucleotide with 3'-phosphorothioate linkage
  modified_base 21: mod_base = OTHER; note = 2'-O-methyl modified nucleotide
cctgctggagtatgaccgcct

SEQ ID NO: 343 - RNA, 21 nt, synthetic construct
  source 1..21: mol_type = other RNA
  modified_base 1: mod_base = OTHER; note = 2'-O-methyl modified nucleotide with 3'-phosphorothioate linkage
  modified_base 2: mod_base = OTHER; note = 2'-O-methyl modified nucleotide with 3'-phosphorothioate linkage
  modified_base 3: mod_base = OTHER; note = 2'-O-methyl modified nucleotide
  modified_base 4: mod_base = OTHER; note = 2'-O-methyl modified nucleotide
  modified_base 5: mod_base = OTHER; note = 2'-O-methyl modified nucleotide
  modified_base 6: mod_base = OTHER; note = 2'-O-methyl modified nucleotide
  modified_base 7: mod_base = OTHER; note = 2'-fluoro modified nucleotide
  modified_base 8: mod_base = OTHER; note = 2'-O-methyl modified nucleotide
  modified_base 9: mod_base = OTHER; note = 2'-fluoro modified nucleotide
  modified_base 10: mod_base = OTHER; note = 2'-fluoro modified nucleotide
  modified_base 11: mod_base = OTHER; note = 2'-fluoro modified nucleotide
  modified_base 12: mod_base = OTHER; note = 2'-O-methyl modified nucleotide
  modified_base 13: mod_base = OTHER; note = 2'-O-methyl modified nucleotide
  modified_base 14: mod_base = OTHER; note = 2'-O-methyl modified nucleotide
  modified_base 15: mod_base = OTHER; note = 2'-O-methyl modified nucleotide
  modified_base 16: mod_base = OTHER; note = 2'-O-methyl modified nucleotide
  modified_base 17: mod_base = OTHER; note = 2'-O-methyl modified nucleotide
  modified_base 18: mod_base = OTHER; note = 2'-O-methyl modified nucleotide
  modified_base 19: mod_base = OTHER; note = 2'-O-methyl modified nucleotide with 3'-phosphorothioate linkage
  modified_base 20: mod_base = OTHER; note = 2'-O-methyl modified nucleotide with 3'-phosphorothioate linkage
  modified_base 21: mod_base = OTHER; note = 2'-O-methyl modified nucleotide
ggagtatgaccgcctggtgga

SEQ ID NO: 344 - RNA, 21 nt, synthetic construct
  source 1..21: mol_type = other RNA
  modified_base 1: mod_base = OTHER; note = 2'-O-methyl modified nucleotide with 3'-phosphorothioate linkage
  modified_base 2: mod_base = OTHER; note = 2'-O-methyl modified nucleotide with 3'-phosphorothioate linkage
  modified_base 3: mod_base = OTHER; note = 2'-O-methyl modified nucleotide
  modified_base 4: mod_base = OTHER; note = 2'-O-methyl modified nucleotide
  modified_base 5: mod_base = OTHER; note = 2'-O-methyl modified nucleotide
  modified_base 6: mod_base = OTHER; note = 2'-O-methyl modified nucleotide
  modified_base 7: mod_base = OTHER; note = 2'-fluoro modified nucleotide
  modified_base 8: mod_base = OTHER; note = 2'-O-methyl modified nucleotide
  modified_base 9: mod_base = OTHER; note = 2'-fluoro modified nucleotide
  modified_base 10: mod_base = OTHER; note = 2'-fluoro modified nucleotide
  modified_base 11: mod_base = OTHER; note = 2'-fluoro modified nucleotide
  modified_base 12: mod_base = OTHER; note = 2'-O-methyl modified nucleotide
  modified_base 13: mod_base = OTHER; note = 2'-O-methyl modified nucleotide
  modified_base 14: mod_base = OTHER; note = 2'-O-methyl modified nucleotide
  modified_base 15: mod_base = OTHER; note = 2'-O-methyl modified nucleotide
  modified_base 16: mod_base = OTHER; note = 2'-O-methyl modified nucleotide
  modified_base 17: mod_base = OTHER; note = 2'-O-methyl modified nucleotide
  modified_base 18: mod_base = OTHER; note = 2'-O-methyl modified nucleotide
  modified_base 19: mod_base = OTHER; note = 2'-O-methyl modified nucleotide with 3'-phosphorothioate linkage
  modified_base 20: mod_base = OTHER; note = 2'-O-methyl modified nucleotide with 3'-phosphorothioate linkage
  modified_base 21: mod_base = OTHER; note = 2'-O-methyl modified nucleotide
gagtatgaccgcctggtggac

SEQ ID NO: 345 - RNA, 21 nt, synthetic construct
  source 1..21: mol_type = other RNA
  modified_base 1: mod_base = OTHER; note = 2'-O-methyl modified nucleotide with 3'-phosphorothioate linkage
  modified_base 2: mod_base = OTHER; note = 2'-O-methyl modified nucleotide with 3'-phosphorothioate linkage
  modified_base 3: mod_base = OTHER; note = 2'-O-methyl modified nucleotide
  modified_base 4: mod_base = OTHER; note = 2'-O-methyl modified nucleotide
  modified_base 5: mod_base = OTHER; note = 2'-O-methyl modified nucleotide
  modified_base 6: mod_base = OTHER; note = 2'-O-methyl modified nucleotide
  modified_base 7: mod_base = OTHER; note = 2'-fluoro modified nucleotide
  modified_base 8: mod_base = OTHER; note = 2'-O-methyl modified nucleotide
  modified_base 9: mod_base = OTHER; note = 2'-fluoro modified nucleotide
  modified_base 10: mod_base = OTHER; note = 2'-fluoro modified nucleotide
  modified_base 11: mod_base = OTHER; note = 2'-fluoro modified nucleotide
  modified_base 12: mod_base = OTHER; note = 2'-O-methyl modified nucleotide
  modified_base 13: mod_base = OTHER; note = 2'-O-methyl modified nucleotide
  modified_base 14: mod_base = OTHER; note = 2'-O-methyl modified nucleotide
  modified_base 15: mod_base = OTHER; note = 2'-O-methyl modified nucleotide
  modified_base 16: mod_base = OTHER; note = 2'-O-methyl modified nucleotide
  modified_base 17: mod_base = OTHER; note = 2'-O-methyl modified nucleotide
  modified_base 18: mod_base = OTHER; note = 2'-O-methyl modified nucleotide
  modified_base 19: mod_base = OTHER; note = 2'-O-methyl modified nucleotide with 3'-phosphorothioate linkage
  modified_base 20: mod_base = OTHER; note = 2'-O-methyl modified nucleotide with 3'-phosphorothioate linkage
  modified_base 21: mod_base = OTHER; note = 2'-O-methyl modified nucleotide
agtatgaccgcctggtggacg

SEQ ID NO: 346 - RNA, 21 nt, synthetic construct
  source 1..21: mol_type = other RNA
  modified_base 1: mod_base = OTHER; note = 2'-O-methyl modified nucleotide with 3'-phosphorothioate linkage
  modified_base 2: mod_base = OTHER; note = 2'-O-methyl modified nucleotide with 3'-phosphorothioate linkage
  modified_base 3: mod_base = OTHER; note = 2'-O-methyl modified nucleotide
  modified_base 4: mod_base = OTHER; note = 2'-O-methyl modified nucleotide
  modified_base 5: mod_base = OTHER; note = 2'-O-methyl modified nucleotide
  modified_base 6: mod_base = OTHER; note = 2'-O-methyl modified nucleotide
  modified_base 7: mod_base = OTHER; note = 2'-fluoro modified nucleotide
  modified_base 8: mod_base = OTHER; note = 2'-O-methyl modified nucleotide
  modified_base 9: mod_base = OTHER; note = 2'-fluoro modified nucleotide
  modified_base 10: mod_base = OTHER; note = 2'-fluoro modified nucleotide
  modified_base 11: mod_base = OTHER; note = 2'-fluoro modified nucleotide
  modified_base 12: mod_base = OTHER; note = 2'-O-methyl modified nucleotide
  modified_base 13: mod_base = OTHER; note = 2'-O-methyl modified nucleotide
  modified_base 14: mod_base = OTHER; note = 2'-O-methyl modified nucleotide
  modified_base 15: mod_base = OTHER; note = 2'-O-methyl modified nucleotide
  modified_base 16: mod_base = OTHER; note = 2'-O-methyl modified nucleotide
  modified_base 17: mod_base = OTHER; note = 2'-O-methyl modified nucleotide
  modified_base 18: mod_base = OTHER; note = 2'-O-methyl modified nucleotide
  modified_base 19: mod_base = OTHER; note = 2'-O-methyl modified nucleotide with 3'-phosphorothioate linkage
  modified_base 20: mod_base = OTHER; note = 2'-O-methyl modified nucleotide with 3'-phosphorothioate linkage
  modified_base 21: mod_base = OTHER; note = 2'-O-methyl modified nucleotide
gtatgaccgcctggtggacga

SEQ ID NO: 347 - RNA, 21 nt, synthetic construct
  source 1..21: mol_type = other RNA
  modified_base 1: mod_base = OTHER; note = 2'-O-methyl modified nucleotide with 3'-phosphorothioate linkage
  modified_base 2: mod_base = OTHER; note = 2'-O-methyl modified nucleotide with 3'-phosphorothioate linkage
  modified_base 3: mod_base = OTHER; note = 2'-O-methyl modified nucleotide
  modified_base 4: mod_base = OTHER; note = 2'-O-methyl modified nucleotide
  modified_base 5: mod_base = OTHER; note = 2'-O-methyl modified nucleotide
  modified_base 6: mod_base = OTHER; note = 2'-O-methyl modified nucleotide
  modified_base 7: mod_base = OTHER; note = 2'-fluoro modified nucleotide
  modified_base 8: mod_base = OTHER; note = 2'-O-methyl modified nucleotide
  modified_base 9: mod_base = OTHER; note = 2'-fluoro modified nucleotide
  modified_base 10: mod_base = OTHER; note = 2'-fluoro modified nucleotide
  modified_base 11: mod_base = OTHER; note = 2'-fluoro modified nucleotide
  modified_base 12: mod_base = OTHER; note = 2'-O-methyl modified nucleotide
  modified_base 13: mod_base = OTHER; note = 2'-O-methyl modified nucleotide
  modified_base 14: mod_base = OTHER; note = 2'-O-methyl modified nucleotide
  modified_base 15: mod_base = OTHER; note = 2'-O-methyl modified nucleotide
  modified_base 16: mod_base = OTHER; note = 2'-O-methyl modified nucleotide
  modified_base 17: mod_base = OTHER; note = 2'-O-methyl modified nucleotide
  modified_base 18: mod_base = OTHER; note = 2'-O-methyl modified nucleotide
  modified_base 19: mod_base = OTHER; note = 2'-O-methyl modified nucleotide with 3'-phosphorothioate linkage
  modified_base 20: mod_base = OTHER; note = 2'-O-methyl modified nucleotide with 3'-phosphorothioate linkage
  modified_base 21: mod_base = OTHER; note = 2'-O-methyl modified nucleotide
tatgaccgcctggtggacgag

SEQ ID NO: 348 - RNA, 21 nt, synthetic construct
  source 1..21: mol_type = other RNA
  modified_base 1: mod_base = OTHER; note = 2'-O-methyl modified nucleotide with 3'-phosphorothioate linkage
  modified_base 2: mod_base = OTHER; note = 2'-O-methyl modified nucleotide with 3'-phosphorothioate linkage
  modified_base 3: mod_base = OTHER; note = 2'-O-methyl modified nucleotide
  modified_base 4: mod_base = OTHER; note = 2'-O-methyl modified nucleotide
  modified_base 5: mod_base = OTHER; note = 2'-O-methyl modified nucleotide
  modified_base 6: mod_base = OTHER; note = 2'-O-methyl modified nucleotide
  modified_base 7: mod_base = OTHER; note = 2'-fluoro modified nucleotide
  modified_base 8: mod_base = OTHER; note = 2'-O-methyl modified nucleotide
  modified_base 9: mod_base = OTHER; note = 2'-fluoro modified nucleotide
  modified_base 10: mod_base = OTHER; note = 2'-fluoro modified nucleotide
  modified_base 11: mod_base = OTHER; note = 2'-fluoro modified nucleotide
  modified_base 12: mod_base = OTHER; note = 2'-O-methyl modified nucleotide
  modified_base 13: mod_base = OTHER; note = 2'-O-methyl modified nucleotide
  modified_base 14: mod_base = OTHER; note = 2'-O-methyl modified nucleotide
  modified_base 15: mod_base = OTHER; note = 2'-O-methyl modified nucleotide
  modified_base 16: mod_base = OTHER; note = 2'-O-methyl modified nucleotide
  modified_base 17: mod_base = OTHER; note = 2'-O-methyl modified nucleotide
  modified_base 18: mod_base = OTHER; note = 2'-O-methyl modified nucleotide
  modified_base 19: mod_base = OTHER; note = 2'-O-methyl modified nucleotide with 3'-phosphorothioate linkage
  modified_base 20: mod_base = OTHER; note = 2'-O-methyl modified nucleotide with 3'-phosphorothioate linkage
  modified_base 21: mod_base = OTHER; note = 2'-O-methyl modified nucleotide
cagcagctgtatgagaagctc

SEQ ID NO: 349 - RNA, 21 nt, synthetic construct
  source 1..21: mol_type = other RNA
  modified_base 1: mod_base = OTHER; note = 2'-O-methyl modified nucleotide with 3'-phosphorothioate linkage
  modified_base 2: mod_base = OTHER; note = 2'-O-methyl modified nucleotide with 3'-phosphorothioate linkage
  modified_base 3: mod_base = OTHER; note = 2'-O-methyl modified nucleotide
  modified_base 4: mod_base = OTHER; note = 2'-O-methyl modified nucleotide
  modified_base 5: mod_base = OTHER; note = 2'-O-methyl modified nucleotide
  modified_base 6: mod_base = OTHER; note = 2'-O-methyl modified nucleotide
  modified_base 7: mod_base = OTHER; note = 2'-fluoro modified nucleotide
  modified_base 8: mod_base = OTHER; note = 2'-O-methyl modified nucleotide
  modified_base 9: mod_base = OTHER; note = 2'-fluoro modified nucleotide
  modified_base 10: mod_base = OTHER; note = 2'-fluoro modified nucleotide
  modified_base 11: mod_base = OTHER; note = 2'-fluoro modified nucleotide
  modified_base 12: mod_base = OTHER; note = 2'-O-methyl modified nucleotide
  modified_base 13: mod_base = OTHER; note = 2'-O-methyl modified nucleotide
  modified_base 14: mod_base = OTHER; note = 2'-O-methyl modified nucleotide
  modified_base 15: mod_base = OTHER; note = 2'-O-methyl modified nucleotide
  modified_base 16: mod_base = OTHER; note = 2'-O-methyl modified nucleotide
  modified_base 17: mod_base = OTHER; note = 2'-O-methyl modified nucleotide
  modified_base 18: mod_base = OTHER; note = 2'-O-methyl modified nucleotide
  modified_base 19: mod_base = OTHER; note = 2'-O-methyl modified nucleotide with 3'-phosphorothioate linkage
  modified_base 20: mod_base = OTHER; note = 2'-O-methyl modified nucleotide with 3'-phosphorothioate linkage
  modified_base 21: mod_base = OTHER; note = 2'-O-methyl modified nucleotide
gctgtatgagaagctcatagg

SEQ ID NO: 350 - RNA, 21 nt, synthetic construct
  source 1..21: mol_type = other RNA
  modified_base 1: mod_base = OTHER; note = 2'-O-methyl modified nucleotide with 3'-phosphorothioate linkage
  modified_base 2: mod_base = OTHER; note = 2'-O-methyl modified nucleotide with 3'-phosphorothioate linkage
  modified_base 3: mod_base = OTHER; note = 2'-O-methyl modified nucleotide
  modified_base 4: mod_base = OTHER; note = 2'-O-methyl modified nucleotide
  modified_base 5: mod_base = OTHER; note = 2'-O-methyl modified nucleotide
  modified_base 6: mod_base = OTHER; note = 2'-O-methyl modified nucleotide
  modified_base 7: mod_base = OTHER; note = 2'-fluoro modified nucleotide
  modified_base 8: mod_base = OTHER; note = 2'-O-methyl modified nucleotide
  modified_base 9: mod_base = OTHER; note = 2'-fluoro modified nucleotide
  modified_base 10: mod_base = OTHER; note = 2'-fluoro modified nucleotide
  modified_base 11: mod_base = OTHER; note = 2'-fluoro modified nucleotide
  modified_base 12: mod_base = OTHER; note = 2'-O-methyl modified nucleotide
  modified_base 13: mod_base = OTHER; note = 2'-O-methyl modified nucleotide
  modified_base 14: mod_base = OTHER; note = 2'-O-methyl modified nucleotide
  modified_base 15: mod_base = OTHER; note = 2'-O-methyl modified nucleotide
  modified_base 16: mod_base = OTHER; note = 2'-O-methyl modified nucleotide
  modified_base 17: mod_base = OTHER; note = 2'-O-methyl modified nucleotide
  modified_base 18: mod_base = OTHER; note = 2'-O-methyl modified nucleotide
  modified_base 19: mod_base = OTHER; note = 2'-O-methyl modified nucleotide with 3'-phosphorothioate linkage
  modified_base 20: mod_base = OTHER; note = 2'-O-methyl modified nucleotide with 3'-phosphorothioate linkage
  modified_base 21: mod_base = OTHER; note = 2'-O-methyl modified nucleotide
tgtatgagaagctcataggtg

SEQ ID NO: 351 - RNA, 21 nt, synthetic construct
  source 1..21: mol_type = other RNA
  modified_base 1: mod_base = OTHER; note = 2'-O-methyl modified nucleotide with 3'-phosphorothioate linkage
  modified_base 2: mod_base = OTHER; note = 2'-O-methyl modified nucleotide with 3'-phosphorothioate linkage
  modified_base 3: mod_base = OTHER; note = 2'-O-methyl modified nucleotide
  modified_base 4: mod_base = OTHER; note = 2'-O-methyl modified nucleotide
  modified_base 5: mod_base = OTHER; note = 2'-O-methyl modified nucleotide
  modified_base 6: mod_base = OTHER; note = 2'-O-methyl modified nucleotide
  modified_base 7: mod_base = OTHER; note = 2'-fluoro modified nucleotide
  modified_base 8: mod_base = OTHER; note = 2'-O-methyl modified nucleotide
  modified_base 9: mod_base = OTHER; note = 2'-fluoro modified nucleotide
  modified_base 10: mod_base = OTHER; note = 2'-fluoro modified nucleotide
  modified_base 11: mod_base = OTHER; note = 2'-fluoro modified nucleotide
  modified_base 12: mod_base = OTHER; note = 2'-O-methyl modified nucleotide
  modified_base 13: mod_base = OTHER; note = 2'-O-methyl modified nucleotide
  modified_base 14: mod_base = OTHER; note = 2'-O-methyl modified nucleotide
  modified_base 15: mod_base = OTHER; note = 2'-O-methyl modified nucleotide
  modified_base 16: mod_base = OTHER; note = 2'-O-methyl modified nucleotide
  modified_base 17: mod_base = OTHER; note = 2'-O-methyl modified nucleotide
  modified_base 18: mod_base = OTHER; note = 2'-O-methyl modified nucleotide
  modified_base 19: mod_base = OTHER; note = 2'-O-methyl modified nucleotide with 3'-phosphorothioate linkage
  modified_base 20: mod_base = OTHER; note = 2'-O-methyl modified nucleotide with 3'-phosphorothioate linkage
  modified_base 21: mod_base = OTHER; note = 2'-O-methyl modified nucleotide
gtatgagaagctcataggtgg

SEQ ID NO: 352 - RNA, 21 nt, synthetic construct
  source 1..21: mol_type = other RNA
  modified_base 1: mod_base = OTHER; note = 2'-O-methyl modified nucleotide with 3'-phosphorothioate linkage
  modified_base 2: mod_base = OTHER; note = 2'-O-methyl modified nucleotide with 3'-phosphorothioate linkage
  modified_base 3: mod_base = OTHER; note = 2'-O-methyl modified nucleotide
  modified_base 4: mod_base = OTHER; note = 2'-O-methyl modified nucleotide
  modified_base 5: mod_base = OTHER; note = 2'-O-methyl modified nucleotide
  modified_base 6: mod_base = OTHER; note = 2'-O-methyl modified nucleotide
  modified_base 7: mod_base = OTHER; note = 2'-fluoro modified nucleotide
  modified_base 8: mod_base = OTHER; note = 2'-O-methyl modified nucleotide
  modified_base 9: mod_base = OTHER; note = 2'-fluoro modified nucleotide
  modified_base 10: mod_base = OTHER; note = 2'-fluoro modified nucleotide
  modified_base 11: mod_base = OTHER; note = 2'-fluoro modified nucleotide
  modified_base 12: mod_base = OTHER; note = 2'-O-methyl modified nucleotide
  modified_base 13: mod_base = OTHER; note = 2'-O-methyl modified nucleotide
  modified_base 14: mod_base = OTHER; note = 2'-O-methyl modified nucleotide
  modified_base 15: mod_base = OTHER; note = 2'-O-methyl modified nucleotide
  modified_base 16: mod_base = OTHER; note = 2'-O-methyl modified nucleotide
  modified_base 17: mod_base = OTHER; note = 2'-O-methyl modified nucleotide
  modified_base 18: mod_base = OTHER; note = 2'-O-methyl modified nucleotide
  modified_base 19: mod_base = OTHER; note = 2'-O-methyl modified nucleotide with 3'-phosphorothioate linkage
  modified_base 20: mod_base = OTHER; note = 2'-O-methyl modified nucleotide with 3'-phosphorothioate linkage
  modified_base 21: mod_base = OTHER; note = 2'-O-methyl modified nucleotide
tatgagaagctcataggtggc

SEQ ID NO: 353 - RNA, 21 nt, synthetic construct
  source 1..21: mol_type = other RNA
  modified_base 1: mod_base = OTHER; note = 2'-O-methyl modified nucleotide with 3'-phosphorothioate linkage
  modified_base 2: mod_base = OTHER; note = 2'-O-methyl modified nucleotide with 3'-phosphorothioate linkage
  modified_base 3: mod_base = OTHER; note = 2'-O-methyl modified nucleotide
  modified_base 4: mod_base = OTHER; note = 2'-O-methyl modified nucleotide
  modified_base 5: mod_base = OTHER; note = 2'-O-methyl modified nucleotide
  modified_base 6: mod_base = OTHER; note = 2'-O-methyl modified nucleotide
  modified_base 7: mod_base = OTHER; note = 2'-fluoro modified nucleotide
  modified_base 8: mod_base = OTHER; note = 2'-O-methyl modified nucleotide
  modified_base 9: mod_base = OTHER; note = 2'-fluoro modified nucleotide
  modified_base 10: mod_base = OTHER; note = 2'-fluoro modified nucleotide
  modified_base 11: mod_base = OTHER; note = 2'-fluoro modified nucleotide
  modified_base 12: mod_base = OTHER; note = 2'-O-methyl modified nucleotide
  modified_base 13: mod_base = OTHER; note = 2'-O-methyl modified nucleotide
  modified_base 14: mod_base = OTHER; note = 2'-O-methyl modified nucleotide
  modified_base 15: mod_base = OTHER; note = 2'-O-methyl modified nucleotide
  modified_base 16: mod_base = OTHER; note = 2'-O-methyl modified nucleotide
  modified_base 17: mod_base = OTHER; note = 2'-O-methyl modified nucleotide
  modified_base 18: mod_base = OTHER; note = 2'-O-methyl modified nucleotide
  modified_base 19: mod_base = OTHER; note = 2'-O-methyl modified nucleotide with 3'-phosphorothioate linkage
  modified_base 20: mod_base = OTHER; note = 2'-O-methyl modified nucleotide with 3'-phosphorothioate linkage
  modified_base 21: mod_base = OTHER; note = 2'-O-methyl modified nucleotide
atgagaagctcataggtggca

SEQ ID NO: 354 - RNA, 21 nt, synthetic construct
  source 1..21: mol_type = other RNA
  modified_base 1: mod_base = OTHER; note = 2'-O-methyl modified nucleotide with 3'-phosphorothioate linkage
  modified_base 2: mod_base = OTHER; note = 2'-O-methyl modified nucleotide with 3'-phosphorothioate linkage
  modified_base 3: mod_base = OTHER; note = 2'-O-methyl modified nucleotide
  modified_base 4: mod_base = OTHER; note = 2'-O-methyl modified nucleotide
  modified_base 5: mod_base = OTHER; note = 2'-O-methyl modified nucleotide
  modified_base 6: mod_base = OTHER; note = 2'-O-methyl modified nucleotide
  modified_base 7: mod_base = OTHER; note = 2'-fluoro modified nucleotide
  modified_base 8: mod_base = OTHER; note = 2'-O-methyl modified nucleotide
  modified_base 9: mod_base = OTHER; note = 2'-fluoro modified nucleotide
  modified_base 10: mod_base = OTHER; note = 2'-fluoro modified nucleotide
  modified_base 11: mod_base = OTHER; note = 2'-fluoro modified nucleotide
  modified_base 12: mod_base = OTHER; note = 2'-O-methyl modified nucleotide
  modified_base 13: mod_base = OTHER; note = 2'-O-methyl modified nucleotide
  modified_base 14: mod_base = OTHER; note = 2'-O-methyl modified nucleotide
  modified_base 15: mod_base = OTHER; note = 2'-O-methyl modified nucleotide
  modified_base 16: mod_base = OTHER; note = 2'-O-methyl modified nucleotide
  modified_base 17: mod_base = OTHER; note = 2'-O-methyl modified nucleotide
  modified_base 18: mod_base = OTHER; note = 2'-O-methyl modified nucleotide
  modified_base 19: mod_base = OTHER; note = 2'-O-methyl modified nucleotide with 3'-phosphorothioate linkage
  modified_base 20: mod_base = OTHER; note = 2'-O-methyl modified nucleotide with 3'-phosphorothioate linkage
  modified_base 21: mod_base = OTHER; note = 2'-O-methyl modified nucleotide
aagctcataggtggcaagtac

SEQ ID NO: 355 - RNA, 21 nt, synthetic construct
  source 1..21: mol_type = other RNA
  modified_base 1: mod_base = OTHER; note = 2'-O-methyl modified nucleotide with 3'-phosphorothioate linkage
  modified_base 2: mod_base = OTHER; note = 2'-O-methyl modified nucleotide with 3'-phosphorothioate linkage
  modified_base 3: mod_base = OTHER; note = 2'-O-methyl modified nucleotide
  modified_base 4: mod_base = OTHER; note = 2'-O-methyl modified nucleotide
  modified_base 5: mod_base = OTHER; note = 2'-O-methyl modified nucleotide
  modified_base 6: mod_base = OTHER; note = 2'-O-methyl modified nucleotide
  modified_base 7: mod_base = OTHER; note = 2'-fluoro modified nucleotide
  modified_base 8: mod_base = OTHER; note = 2'-O-methyl modified nucleotide
  modified_base 9: mod_base = OTHER; note = 2'-fluoro modified nucleotide
  modified_base 10: mod_base = OTHER; note = 2'-fluoro modified nucleotide
  modified_base 11: mod_base = OTHER; note = 2'-fluoro modified nucleotide
  modified_base 12: mod_base = OTHER; note = 2'-O-methyl modified nucleotide
  modified_base 13: mod_base = OTHER; note = 2'-O-methyl modified nucleotide
  modified_base 14: mod_base = OTHER; note = 2'-O-methyl modified nucleotide
  modified_base 15: mod_base = OTHER; note = 2'-O-methyl modified nucleotide
  modified_base 16: mod_base = OTHER; note = 2'-O-methyl modified nucleotide
  modified_base 17: mod_base = OTHER; note = 2'-O-methyl modified nucleotide
  modified_base 18: mod_base = OTHER; note = 2'-O-methyl modified nucleotide
  modified_base 19: mod_base = OTHER; note = 2'-O-methyl modified nucleotide with 3'-phosphorothioate linkage
  modified_base 20: mod_base = OTHER; note = 2'-O-methyl modified nucleotide with 3'-phosphorothioate linkage
  modified_base 21: mod_base = OTHER; note = 2'-O-methyl modified nucleotide
agctcataggtggcaagtaca

SEQ ID NO: 356 - RNA, 21 nt, synthetic construct
  source 1..21: mol_type = other RNA
  modified_base 1: mod_base = OTHER; note = 2'-O-methyl modified nucleotide with 3'-phosphorothioate linkage
  modified_base 2: mod_base = OTHER; note = 2'-O-methyl modified nucleotide with 3'-phosphorothioate linkage
  modified_base 3: mod_base = OTHER; note = 2'-O-methyl modified nucleotide
  modified_base 4: mod_base = OTHER; note = 2'-O-methyl modified nucleotide
  modified_base 5: mod_base = OTHER; note = 2'-O-methyl modified nucleotide
  modified_base 6: mod_base = OTHER; note = 2'-O-methyl modified nucleotide
  modified_base 7: mod_base = OTHER; note = 2'-fluoro modified nucleotide
  modified_base 8: mod_base = OTHER; note = 2'-O-methyl modified nucleotide
  modified_base 9: mod_base = OTHER; note = 2'-fluoro modified nucleotide
  modified_base 10: mod_base = OTHER; note = 2'-fluoro modified nucleotide
  modified_base 11: mod_base = OTHER; note = 2'-fluoro modified nucleotide
  modified_base 12: mod_base = OTHER; note = 2'-O-methyl modified nucleotide
  modified_base 13: mod_base = OTHER; note = 2'-O-methyl modified nucleotide
  modified_base 14: mod_base = OTHER; note = 2'-O-methyl modified nucleotide
  modified_base 15: mod_base = OTHER; note = 2'-O-methyl modified nucleotide
  modified_base 16: mod_base = OTHER; note = 2'-O-methyl modified nucleotide
  modified_base 17: mod_base = OTHER; note = 2'-O-methyl modified nucleotide
  modified_base 18: mod_base = OTHER; note = 2'-O-methyl modified nucleotide
  modified_base 19: mod_base = OTHER; note = 2'-O-methyl modified nucleotide with 3'-phosphorothioate linkage
  modified_base 20: mod_base = OTHER; note = 2'-O-methyl modified nucleotide with 3'-phosphorothioate linkage
  modified_base 21: mod_base = OTHER; note = 2'-O-methyl modified nucleotide
tcataggtggcaagtacatgg

SEQ ID NO: 357 - RNA, 21 nt, synthetic construct
  source 1..21: mol_type = other RNA
  modified_base 1: mod_base = OTHER; note = 2'-O-methyl modified nucleotide with 3'-phosphorothioate linkage
  modified_base 2: mod_base = OTHER; note = 2'-O-methyl modified nucleotide with 3'-phosphorothioate linkage
  modified_base 3: mod_base = OTHER; note = 2'-O-methyl modified nucleotide
  modified_base 4: mod_base = OTHER; note = 2'-O-methyl modified nucleotide
  modified_base 5: mod_base = OTHER; note = 2'-O-methyl modified nucleotide
  modified_base 6: mod_base = OTHER; note = 2'-O-methyl modified nucleotide
  modified_base 7: mod_base = OTHER; note = 2'-fluoro modified nucleotide
  modified_base 8: mod_base = OTHER; note = 2'-O-methyl modified nucleotide
  modified_base 9: mod_base = OTHER; note = 2'-fluoro modified nucleotide
  modified_base 10: mod_base = OTHER; note = 2'-fluoro modified nucleotide
  modified_base 11: mod_base = OTHER; note = 2'-fluoro modified nucleotide
  modified_base 12: mod_base = OTHER; note = 2'-O-methyl modified nucleotide
  modified_base 13: mod_base = OTHER; note = 2'-O-methyl modified nucleotide
  modified_base 14: mod_base = OTHER; note = 2'-O-methyl modified nucleotide
  modified_base 15: mod_base = OTHER; note = 2'-O-methyl modified nucleotide
  modified_base 16: mod_base = OTHER; note = 2'-O-methyl modified nucleotide
  modified_base 17: mod_base = OTHER; note = 2'-O-methyl modified nucleotide
  modified_base 18: mod_base = OTHER; note = 2'-O-methyl modified nucleotide
  modified_base 19: mod_base = OTHER; note = 2'-O-methyl modified nucleotide with 3'-phosphorothioate linkage
  modified_base 20: mod_base = OTHER; note = 2'-O-methyl modified nucleotide with 3'-phosphorothioate linkage
  modified_base 21: mod_base = OTHER; note = 2'-O-methyl modified nucleotide
aggtggcaagtacatgggcga

SEQ ID NO: 358 - RNA, 21 nt, synthetic construct
  source 1..21: mol_type = other RNA
  modified_base 1: mod_base = OTHER; note = 2'-O-methyl modified nucleotide with 3'-phosphorothioate linkage
  modified_base 2: mod_base = OTHER; note = 2'-O-methyl modified nucleotide with 3'-phosphorothioate linkage
  modified_base 3: mod_base = OTHER; note = 2'-O-methyl modified nucleotide
  modified_base 4: mod_base = OTHER; note = 2'-O-methyl modified nucleotide
  modified_base 5: mod_base = OTHER; note = 2'-O-methyl modified nucleotide
  modified_base 6: mod_base = OTHER; note = 2'-O-methyl modified nucleotide
  modified_base 7: mod_base = OTHER; note = 2'-fluoro modified nucleotide
  modified_base 8: mod_base = OTHER; note = 2'-O-methyl modified nucleotide
  modified_base 9: mod_base = OTHER; note = 2'-fluoro modified nucleotide
  modified_base 10: mod_base = OTHER; note = 2'-fluoro modified nucleotide
  modified_base 11: mod_base = OTHER; note = 2'-fluoro modified nucleotide
  modified_base 12: mod_base = OTHER; note = 2'-O-methyl modified nucleotide
  modified_base 13: mod_base = OTHER; note = 2'-O-methyl modified nucleotide
  modified_base 14: mod_base = OTHER; note = 2'-O-methyl modified nucleotide
  modified_base 15: mod_base = OTHER; note = 2'-O-methyl modified nucleotide
  modified_base 16: mod_base = OTHER; note = 2'-O-methyl modified nucleotide
  modified_base 17: mod_base = OTHER; note = 2'-O-methyl modified nucleotide
  modified_base 18: mod_base = OTHER; note = 2'-O-methyl modified nucleotide
  modified_base 19: mod_base = OTHER; note = 2'-O-methyl modified nucleotide with 3'-phosphorothioate linkage
  modified_base 20: mod_base = OTHER; note = 2'-O-methyl modified nucleotide with 3'-phosphorothioate linkage
  modified_base 21: mod_base = OTHER; note = 2'-O-methyl modified nucleotide
gtggcaagtacatgggcgagc

SEQ ID NO: 359 - RNA, 21 nt, synthetic construct
  source 1..21: mol_type = other RNA
  modified_base 1: mod_base = OTHER; note = 2'-O-methyl modified nucleotide with 3'-phosphorothioate linkage
  modified_base 2: mod_base = OTHER; note = 2'-O-methyl modified nucleotide with 3'-phosphorothioate linkage
  modified_base 3: mod_base = OTHER; note = 2'-O-methyl modified nucleotide
  modified_base 4: mod_base = OTHER; note = 2'-O-methyl modified nucleotide
  modified_base 5: mod_base = OTHER; note = 2'-O-methyl modified nucleotide
  modified_base 6: mod_base = OTHER; note = 2'-O-methyl modified nucleotide
  modified_base 7: mod_base = OTHER; note = 2'-fluoro modified nucleotide
  modified_base 8: mod_base = OTHER; note = 2'-O-methyl modified nucleotide
  modified_base 9: mod_base = OTHER; note = 2'-fluoro modified nucleotide
  modified_base 10: mod_base = OTHER; note = 2'-fluoro modified nucleotide
  modified_base 11: mod_base = OTHER; note = 2'-fluoro modified nucleotide
  modified_base 12: mod_base = OTHER; note = 2'-O-methyl modified nucleotide
  modified_base 13: mod_base = OTHER; note = 2'-O-methyl modified nucleotide
  modified_base 14: mod_base = OTHER; note = 2'-O-methyl modified nucleotide
  modified_base 15: mod_base = OTHER; note = 2'-O-methyl modified nucleotide
  modified_base 16: mod_base = OTHER; note = 2'-O-methyl modified nucleotide
  modified_base 17: mod_base = OTHER; note = 2'-O-methyl modified nucleotide
  modified_base 18: mod_base = OTHER; note = 2'-O-methyl modified nucleotide
  modified_base 19: mod_base = OTHER; note = 2'-O-methyl modified nucleotide with 3'-phosphorothioate linkage
  modified_base 20: mod_base = OTHER; note = 2'-O-methyl modified nucleotide with 3'-phosphorothioate linkage
  modified_base 21: mod_base = OTHER; note = 2'-O-methyl modified nucleotide
ggcaagtacatgggcgagctg

SEQ ID NO: 360 - RNA, 21 nt, synthetic construct
  source 1..21: mol_type = other RNA
  modified_base 1: mod_base = OTHER; note = 2'-O-methyl modified nucleotide with 3'-phosphorothioate linkage
  modified_base 2: mod_base = OTHER; note = 2'-O-methyl modified nucleotide with 3'-phosphorothioate linkage
  modified_base 3: mod_base = OTHER; note = 2'-O-methyl modified nucleotide
  modified_base 4: mod_base = OTHER; note = 2'-O-methyl modified nucleotide
  modified_base 5: mod_base = OTHER; note = 2'-O-methyl modified nucleotide
  modified_base 6: mod_base = OTHER; note = 2'-O-methyl modified nucleotide
  modified_base 7: mod_base = OTHER; note = 2'-fluoro modified nucleotide
  modified_base 8: mod_base = OTHER; note = 2'-O-methyl modified nucleotide
  modified_base 9: mod_base = OTHER; note = 2'-fluoro modified nucleotide
  modified_base 10: mod_base = OTHER; note = 2'-fluoro modified nucleotide
  modified_base 11: mod_base = OTHER; note = 2'-fluoro modified nucleotide
  modified_base 12: mod_base = OTHER; note = 2'-O-methyl modified nucleotide
  modified_base 13: mod_base = OTHER; note = 2'-O-methyl modified nucleotide
  modified_base 14: mod_base = OTHER; note = 2'-O-methyl modified nucleotide
  modified_base 15: mod_base = OTHER; note = 2'-O-methyl modified nucleotide
  modified_base 16: mod_base = OTHER; note = 2'-O-methyl modified nucleotide
  modified_base 17: mod_base = OTHER; note = 2'-O-methyl modified nucleotide
  modified_base 18: mod_base = OTHER; note = 2'-O-methyl modified nucleotide
  modified_base 19: mod_base = OTHER; note = 2'-O-methyl modified nucleotide with 3'-phosphorothioate linkage
  modified_base 20: mod_base = OTHER; note = 2'-O-methyl modified nucleotide with 3'-phosphorothioate linkage
  modified_base 21: mod_base = OTHER; note = 2'-O-methyl modified nucleotide
gctgctcaggctcgtggacga

SEQ ID NO: 361 - RNA, 21 nt, synthetic construct
  source 1..21: mol_type = other RNA
  modified_base 1: mod_base = OTHER; note = 2'-O-methyl modified nucleotide with 3'-phosphorothioate linkage
  modified_base 2: mod_base = OTHER; note = 2'-O-methyl modified nucleotide with 3'-phosphorothioate linkage
  modified_base 3: mod_base = OTHER; note = 2'-O-methyl modified nucleotide
  modified_base 4: mod_base = OTHER; note = 2'-O-methyl modified nucleotide
  modified_base 5: mod_base = OTHER; note = 2'-O-methyl modified nucleotide
  modified_base 6: mod_base = OTHER; note = 2'-O-methyl modified nucleotide
  modified_base 7: mod_base = OTHER; note = 2'-fluoro modified nucleotide
  modified_base 8: mod_base = OTHER; note = 2'-O-methyl modified nucleotide
  modified_base 9: mod_base = OTHER; note = 2'-fluoro modified nucleotide
  modified_base 10: mod_base = OTHER; note = 2'-fluoro modified nucleotide
  modified_base 11: mod_base = OTHER; note = 2'-fluoro modified nucleotide
  modified_base 12: mod_base = OTHER; note = 2'-O-methyl modified nucleotide
  modified_base 13: mod_base = OTHER; note = 2'-O-methyl modified nucleotide
  modified_base 14: mod_base = OTHER; note = 2'-O-methyl modified nucleotide
  modified_base 15: mod_base = OTHER; note = 2'-O-methyl modified nucleotide
  modified_base 16: mod_base = OTHER; note = 2'-O-methyl modified nucleotide
  modified_base 17: mod_base = OTHER; note = 2'-O-methyl modified nucleotide
  modified_base 18: mod_base = OTHER; note = 2'-O-methyl modified nucleotide
  modified_base 19: mod_base = OTHER; note = 2'-O-methyl modified nucleotide with 3'-phosphorothioate linkage
  modified_base 20: mod_base = OTHER; note = 2'-O-methyl modified nucleotide with 3'-phosphorothioate linkage
  modified_base 21: mod_base = OTHER; note = 2'-O-methyl modified nucleotide
ctgctcaggctcgtggacgaa

SEQ ID NO: 362 - RNA, 21 nt, synthetic construct
  source 1..21: mol_type = other RNA
  modified_base 1: mod_base = OTHER; note = 2'-O-methyl modified nucleotide with 3'-phosphorothioate linkage
  modified_base 2: mod_base = OTHER; note = 2'-O-methyl modified nucleotide with 3'-phosphorothioate linkage
  modified_base 3: mod_base = OTHER; note = 2'-O-methyl modified nucleotide
  modified_base 4: mod_base = OTHER; note = 2'-O-methyl modified nucleotide
  modified_base 5: mod_base = OTHER; note = 2'-O-methyl modified nucleotide
  modified_base 6: mod_base = OTHER; note = 2'-O-methyl modified nucleotide
  modified_base 7: mod_base = OTHER; note = 2'-fluoro modified nucleotide
  modified_base 8: mod_base = OTHER; note = 2'-O-methyl modified nucleotide
  modified_base 9: mod_base = OTHER; note = 2'-fluoro modified nucleotide
  modified_base 10: mod_base = OTHER; note = 2'-fluoro modified nucleotide
  modified_base 11: mod_base = OTHER; note = 2'-fluoro modified nucleotide
  modified_base 12: mod_base = OTHER; note = 2'-O-methyl modified nucleotide
  modified_base 13: mod_base = OTHER; note = 2'-O-methyl modified nucleotide
  modified_base 14: mod_base = OTHER; note = 2'-O-methyl modified nucleotide
  modified_base 15: mod_base = OTHER; note = 2'-O-methyl modified nucleotide
  modified_base 16: mod_base = OTHER; note = 2'-O-methyl modified nucleotide
  modified_base 17: mod_base = OTHER; note = 2'-O-methyl modified nucleotide
  modified_base 18: mod_base = OTHER; note = 2'-O-methyl modified nucleotide
  modified_base 19: mod_base = OTHER; note = 2'-O-methyl modified nucleotide with 3'-phosphorothioate linkage
  modified_base 20: mod_base = OTHER; note = 2'-O-methyl modified nucleotide with 3'-phosphorothioate linkage
  modified_base 21: mod_base = OTHER; note = 2'-O-methyl modified nucleotide
cgaccgcaagcagatctacaa

SEQ ID NO: 363 - RNA, 21 nt, synthetic construct
  source 1..21: mol_type = other RNA
  modified_base 1: mod_base = OTHER; note = 2'-O-methyl modified nucleotide with 3'-phosphorothioate linkage
  modified_base 2: mod_base = OTHER; note = 2'-O-methyl modified nucleotide with 3'-phosphorothioate linkage
  modified_base 3: mod_base = OTHER; note = 2'-O-methyl modified nucleotide
  modified_base 4: mod_base = OTHER; note = 2'-O-methyl modified nucleotide
  modified_base 5: mod_base = OTHER; note = 2'-O-methyl modified nucleotide
  modified_base 6: mod_base = OTHER; note = 2'-O-methyl modified nucleotide
  modified_base 7: mod_base = OTHER; note = 2'-fluoro modified nucleotide
  modified_base 8: mod_base = OTHER; note = 2'-O-methyl modified nucleotide
  modified_base 9: mod_base = OTHER; note = 2'-fluoro modified nucleotide
  modified_base 10: mod_base = OTHER; note = 2'-fluoro modified nucleotide
  modified_base 11: mod_base = OTHER; note = 2'-fluoro modified nucleotide
  modified_base 12: mod_base = OTHER; note = 2'-O-methyl modified nucleotide
  modified_base 13: mod_base = OTHER; note = 2'-O-methyl modified nucleotide
  modified_base 14: mod_base = OTHER; note = 2'-O-methyl modified nucleotide
  modified_base 15: mod_base = OTHER; note = 2'-O-methyl modified nucleotide
  modified_base 16: mod_base = OTHER; note = 2'-O-methyl modified nucleotide
  modified_base 17: mod_base = OTHER; note = 2'-O-methyl modified nucleotide
  modified_base 18: mod_base = OTHER; note = 2'-O-methyl modified nucleotide
  modified_base 19: mod_base = OTHER; note = 2'-O-methyl modified nucleotide with 3'-phosphorothioate linkage
  modified_base 20: mod_base = OTHER; note = 2'-O-methyl modified nucleotide with 3'-phosphorothioate linkage
  modified_base 21: mod_base = OTHER; note = 2'-O-methyl modified nucleotide
agcagatctacaacatcctga

SEQ ID NO: 364 - RNA, 21 nt, synthetic construct
  source 1..21: mol_type = other RNA
  modified_base 1: mod_base = OTHER; note = 2'-O-methyl modified nucleotide with 3'-phosphorothioate linkage
  modified_base 2: mod_base = OTHER; note = 2'-O-methyl modified nucleotide with 3'-phosphorothioate linkage
  modified_base 3: mod_base = OTHER; note = 2'-O-methyl modified nucleotide
  modified_base 4: mod_base = OTHER; note = 2'-O-methyl modified nucleotide
  modified_base 5: mod_base = OTHER; note = 2'-O-methyl modified nucleotide
  modified_base 6: mod_base = OTHER; note = 2'-O-methyl modified nucleotide
  modified_base 7: mod_base = OTHER; note = 2'-fluoro modified nucleotide
  modified_base 8: mod_base = OTHER; note = 2'-O-methyl modified nucleotide
  modified_base 9: mod_base = OTHER; note = 2'-fluoro modified nucleotide
  modified_base 10: mod_base = OTHER; note = 2'-fluoro modified nucleotide
  modified_base 11: mod_base = OTHER; note = 2'-fluoro modified nucleotide
  modified_base 12: mod_base = OTHER; note = 2'-O-methyl modified nucleotide
  modified_base 13: mod_base = OTHER; note = 2'-O-methyl modified nucleotide
  modified_base 14: mod_base = OTHER; note = 2'-O-methyl modified nucleotide
  modified_base 15: mod_base = OTHER; note = 2'-O-methyl modified nucleotide
  modified_base 16: mod_base = OTHER; note = 2'-O-methyl modified nucleotide
  modified_base 17: mod_base = OTHER; note = 2'-O-methyl modified nucleotide
  modified_base 18: mod_base = OTHER; note = 2'-O-methyl modified nucleotide
  modified_base 19: mod_base = OTHER; note = 2'-O-methyl modified nucleotide with 3'-phosphorothioate linkage
  modified_base 20: mod_base = OTHER; note = 2'-O-methyl modified nucleotide with 3'-phosphorothioate linkage
  modified_base 21: mod_base = OTHER; note = 2'-O-methyl modified nucleotide
atctacaacatcctgagcacg

SEQ ID NO: 365 - RNA, 21 nt, synthetic construct
  source 1..21: mol_type = other RNA
  modified_base 1: mod_base = OTHER; note = 2'-O-methyl modified nucleotide with 3'-phosphorothioate linkage
  modified_base 2: mod_base = OTHER; note = 2'-O-methyl modified nucleotide with 3'-phosphorothioate linkage
  modified_base 3: mod_base = OTHER; note = 2'-O-methyl modified nucleotide
  modified_base 4: mod_base = OTHER; note = 2'-O-methyl modified nucleotide
  modified_base 5: mod_base = OTHER; note = 2'-O-methyl modified nucleotide
  modified_base 6: mod_base = OTHER; note = 2'-O-methyl modified nucleotide
  modified_base 7: mod_base = OTHER; note = 2'-fluoro modified nucleotide
  modified_base 8: mod_base = OTHER; note = 2'-O-methyl modified nucleotide
  modified_base 9: mod_base = OTHER; note = 2'-fluoro modified nucleotide
  modified_base 10: mod_base = OTHER; note = 2'-fluoro modified nucleotide
  modified_base 11: mod_base = OTHER; note = 2'-fluoro modified nucleotide
  modified_base 12: mod_base = OTHER; note = 2'-O-methyl modified nucleotide
  modified_base 13: mod_base = OTHER; note = 2'-O-methyl modified nucleotide
  modified_base 14: mod_base = OTHER; note = 2'-O-methyl modified nucleotide
  modified_base 15: mod_base = OTHER; note = 2'-O-methyl modified nucleotide
  modified_base 16: mod_base = OTHER; note = 2'-O-methyl modified nucleotide
  modified_base 17: mod_base = OTHER; note = 2'-O-methyl modified nucleotide
  modified_base 18: mod_base = OTHER; note = 2'-O-methyl modified nucleotide
  modified_base 19: mod_base = OTHER; note = 2'-O-methyl modified nucleotide with 3'-phosphorothioate linkage
  modified_base 20: mod_base = OTHER; note = 2'-O-methyl modified nucleotide with 3'-phosphorothioate linkage
  modified_base 21: mod_base = OTHER; note = 2'-O-methyl modified nucleotide
ctacaacatcctgagcacgct

SEQ ID NO: 366 - RNA, 21 nt, synthetic construct
  source 1..21: mol_type = other RNA
  modified_base 1: mod_base = OTHER; note = 2'-O-methyl modified nucleotide with 3'-phosphorothioate linkage
  modified_base 2: mod_base = OTHER; note = 2'-O-methyl modified nucleotide with 3'-phosphorothioate linkage
  modified_base 3: mod_base = OTHER; note = 2'-O-methyl modified nucleotide
  modified_base 4: mod_base = OTHER; note = 2'-O-methyl modified nucleotide
  modified_base 5: mod_base = OTHER; note = 2'-O-methyl modified nucleotide
  modified_base 6: mod_base = OTHER; note = 2'-O-methyl modified nucleotide
  modified_base 7: mod_base = OTHER; note = 2'-fluoro modified nucleotide
  modified_base 8: mod_base = OTHER; note = 2'-O-methyl modified nucleotide
  modified_base 9: mod_base = OTHER; note = 2'-fluoro modified nucleotide
  modified_base 10: mod_base = OTHER; note = 2'-fluoro modified nucleotide
  modified_base 11: mod_base = OTHER; note = 2'-fluoro modified nucleotide
  modified_base 12: mod_base = OTHER; note = 2'-O-methyl modified nucleotide
  modified_base 13: mod_base = OTHER; note = 2'-O-methyl modified nucleotide
  modified_base 14: mod_base = OTHER; note = 2'-O-methyl modified nucleotide
  modified_base 15: mod_base = OTHER; note = 2'-O-methyl modified nucleotide
  modified_base 16: mod_base = OTHER; note = 2'-O-methyl modified nucleotide
  modified_base 17: mod_base = OTHER; note = 2'-O-methyl modified nucleotide
  modified_base 18: mod_base = OTHER; note = 2'-O-methyl modified nucleotide
  modified_base 19: mod_base = OTHER; note = 2'-O-methyl modified nucleotide with 3'-phosphorothioate linkage
  modified_base 20: mod_base = OTHER; note = 2'-O-methyl modified nucleotide with 3'-phosphorothioate linkage
  modified_base 21: mod_base = OTHER; note = 2'-O-methyl modified nucleotide
atgcgcatcactgtgggcgtg

SEQ ID NO: 367 - RNA, 21 nt, synthetic construct
  source 1..21: mol_type = other RNA
  modified_base 1: mod_base = OTHER; note = 2'-O-methyl modified nucleotide with 3'-phosphorothioate linkage
  modified_base 2: mod_base = OTHER; note = 2'-O-methyl modified nucleotide with 3'-phosphorothioate linkage
  modified_base 3: mod_base = OTHER; note = 2'-O-methyl modified nucleotide
  modified_base 4: mod_base = OTHER; note = 2'-O-methyl modified nucleotide
  modified_base 5: mod_base = OTHER; note = 2'-O-methyl modified nucleotide
  modified_base 6: mod_base = OTHER; note = 2'-O-methyl modified nucleotide
  modified_base 7: mod_base = OTHER; note = 2'-fluoro modified nucleotide
  modified_base 8: mod_base = OTHER; note = 2'-O-methyl modified nucleotide
  modified_base 9: mod_base = OTHER; note = 2'-fluoro modified nucleotide
  modified_base 10: mod_base = OTHER; note = 2'-fluoro modified nucleotide
  modified_base 11: mod_base = OTHER; note = 2'-fluoro modified nucleotide
  modified_base 12: mod_base = OTHER; note = 2'-O-methyl modified nucleotide
  modified_base 13: mod_base = OTHER; note = 2'-O-methyl modified nucleotide
  modified_base 14: mod_base = OTHER; note = 2'-O-methyl modified nucleotide
  modified_base 15: mod_base = OTHER; note = 2'-O-methyl modified nucleotide
  modified_base 16: mod_base = OTHER; note = 2'-O-methyl modified nucleotide
  modified_base 17: mod_base = OTHER; note = 2'-O-methyl modified nucleotide
  modified_base 18: mod_base = OTHER; note = 2'-O-methyl modified nucleotide
  modified_base 19: mod_base = OTHER; note = 2'-O-methyl modified nucleotide with 3'-phosphorothioate linkage
  modified_base 20: mod_base = OTHER; note = 2'-O-methyl modified nucleotide with 3'-phosphorothioate linkage
  modified_base 21: mod_base = OTHER; note = 2'-O-methyl modified nucleotide
tcactgtgggcgtggatggct

SEQ ID NO: 368 - RNA, 21 nt, synthetic construct
  source 1..21: mol_type = other RNA
  modified_base 1: mod_base = OTHER; note = 2'-O-methyl modified nucleotide with 3'-phosphorothioate linkage
  modified_base 2: mod_base = OTHER; note = 2'-O-methyl modified nucleotide with 3'-phosphorothioate linkage
  modified_base 3: mod_base = OTHER; note = 2'-O-methyl modified nucleotide
  modified_base 4: mod_base = OTHER; note = 2'-O-methyl modified nucleotide
  modified_base 5: mod_base = OTHER; note = 2'-O-methyl modified nucleotide
  modified_base 6: mod_base = OTHER; note = 2'-O-methyl modified nucleotide
  modified_base 7: mod_base = OTHER; note = 2'-fluoro modified nucleotide
  modified_base 8: mod_base = OTHER; note = 2'-O-methyl modified nucleotide
  modified_base 9: mod_base = OTHER; note = 2'-fluoro modified nucleotide
  modified_base 10: mod_base = OTHER; note = 2'-fluoro modified nucleotide
  modified_base 11: mod_base = OTHER; note = 2'-fluoro modified nucleotide
  modified_base 12: mod_base = OTHER; note = 2'-O-methyl modified nucleotide
  modified_base 13: mod_base = OTHER; note = 2'-O-methyl modified nucleotide
  modified_base 14: mod_base = OTHER; note = 2'-O-methyl modified nucleotide
  modified_base 15: mod_base = OTHER; note = 2'-O-methyl modified nucleotide
  modified_base 16: mod_base = OTHER; note = 2'-O-methyl modified nucleotide
  modified_base 17: mod_base = OTHER; note = 2'-O-methyl modified nucleotide
  modified_base 18: mod_base = OTHER; note = 2'-O-methyl modified nucleotide
  modified_base 19: mod_base = OTHER; note = 2'-O-methyl modified nucleotide with 3'-phosphorothioate linkage
  modified_base 20: mod_base = OTHER; note = 2'-O-methyl modified nucleotide with 3'-phosphorothioate linkage
  modified_base 21: mod_base = OTHER; note = 2'-O-methyl modified nucleotide
cactgtgggcgtggatggctc

SEQ ID NO: 369 - RNA, 21 nt, synthetic construct
  source 1..21: mol_type = other RNA
  modified_base 1: mod_base = OTHER; note = 2'-O-methyl modified nucleotide with 3'-phosphorothioate linkage
  modified_base 2: mod_base = OTHER; note = 2'-O-methyl modified nucleotide with 3'-phosphorothioate linkage
  modified_base 3: mod_base = OTHER; note = 2'-O-methyl modified nucleotide
  modified_base 4: mod_base = OTHER; note = 2'-O-methyl modified nucleotide
  modified_base 5: mod_base = OTHER; note = 2'-O-methyl modified nucleotide
  modified_base 6: mod_base = OTHER; note = 2'-O-methyl modified nucleotide
  modified_base 7: mod_base = OTHER; note = 2'-fluoro modified nucleotide
  modified_base 8: mod_base = OTHER; note = 2'-O-methyl modified nucleotide
  modified_base 9: mod_base = OTHER; note = 2'-fluoro modified nucleotide
  modified_base 10: mod_base = OTHER; note = 2'-fluoro modified nucleotide
  modified_base 11: mod_base = OTHER; note = 2'-fluoro modified nucleotide
  modified_base 12: mod_base = OTHER; note = 2'-O-methyl modified nucleotide
  modified_base 13: mod_base = OTHER; note = 2'-O-methyl modified nucleotide
  modified_base 14: mod_base = OTHER; note = 2'-O-methyl modified nucleotide
  modified_base 15: mod_base = OTHER; note = 2'-O-methyl modified nucleotide
  modified_base 16: mod_base = OTHER; note = 2'-O-methyl modified nucleotide
  modified_base 17: mod_base = OTHER; note = 2'-O-methyl modified nucleotide
  modified_base 18: mod_base = OTHER; note = 2'-O-methyl modified nucleotide
  modified_base 19: mod_base = OTHER; note = 2'-O-methyl modified nucleotide with 3'-phosphorothioate linkage
  modified_base 20: mod_base = OTHER; note = 2'-O-methyl modified nucleotide with 3'-phosphorothioate linkage
  modified_base 21: mod_base = OTHER; note = 2'-O-methyl modified nucleotide
actgtgggcgtggatggctcc

SEQ ID NO: 370 - RNA, 21 nt, synthetic construct
  source 1..21: mol_type = other RNA
  modified_base 1: mod_base = OTHER; note = 2'-O-methyl modified nucleotide with 3'-phosphorothioate linkage
  modified_base 2: mod_base = OTHER; note = 2'-O-methyl modified nucleotide with 3'-phosphorothioate linkage
  modified_base 3: mod_base = OTHER; note = 2'-O-methyl modified nucleotide
  modified_base 4: mod_base = OTHER; note = 2'-O-methyl modified nucleotide
  modified_base 5: mod_base = OTHER; note = 2'-O-methyl modified nucleotide
  modified_base 6: mod_base = OTHER; note = 2'-O-methyl modified nucleotide
  modified_base 7: mod_base = OTHER; note = 2'-fluoro modified nucleotide
  modified_base 8: mod_base = OTHER; note = 2'-O-methyl modified nucleotide
  modified_base 9: mod_base = OTHER; note = 2'-fluoro modified nucleotide
  modified_base 10: mod_base = OTHER; note = 2'-fluoro modified nucleotide
  modified_base 11: mod_base = OTHER; note = 2'-fluoro modified nucleotide
  modified_base 12: mod_base = OTHER; note = 2'-O-methyl modified nucleotide
  modified_base 13: mod_base = OTHER; note = 2'-O-methyl modified nucleotide
  modified_base 14: mod_base = OTHER; note = 2'-O-methyl modified nucleotide
  modified_base 15: mod_base = OTHER; note = 2'-O-methyl modified nucleotide
  modified_base 16: mod_base = OTHER; note = 2'-O-methyl modified nucleotide
  modified_base 17: mod_base = OTHER; note = 2'-O-methyl modified nucleotide
  modified_base 18: mod_base = OTHER; note = 2'-O-methyl modified nucleotide
  modified_base 19: mod_base = OTHER; note = 2'-O-methyl modified nucleotide with 3'-phosphorothioate linkage
  modified_base 20: mod_base = OTHER; note = 2'-O-methyl modified nucleotide with 3'-phosphorothioate linkage
  modified_base 21: mod_base = OTHER; note = 2'-O-methyl modified nucleotide
tgggcgtggatggctccgtgt

SEQ ID NO: 371 - RNA, 21 nt, synthetic construct
  source 1..21: mol_type = other RNA
  modified_base 1: mod_base = OTHER; note = 2'-O-methyl modified nucleotide with 3'-phosphorothioate linkage
  modified_base 2: mod_base = OTHER; note = 2'-O-methyl modified nucleotide with 3'-phosphorothioate linkage
  modified_base 3: mod_base = OTHER; note = 2'-O-methyl modified nucleotide
  modified_base 4: mod_base = OTHER; note = 2'-O-methyl modified nucleotide
  modified_base 5: mod_base = OTHER; note = 2'-O-methyl modified nucleotide
  modified_base 6: mod_base = OTHER; note = 2'-O-methyl modified nucleotide
  modified_base 7: mod_base = OTHER; note = 2'-fluoro modified nucleotide
  modified_base 8: mod_base = OTHER; note = 2'-O-methyl modified nucleotide
  modified_base 9: mod_base = OTHER; note = 2'-fluoro modified nucleotide
  modified_base 10: mod_base = OTHER; note = 2'-fluoro modified nucleotide
  modified_base 11: mod_base = OTHER; note = 2'-fluoro modified nucleotide
  modified_base 12: mod_base = OTHER; note = 2'-O-methyl modified nucleotide
  modified_base 13: mod_base = OTHER; note = 2'-O-methyl modified nucleotide
  modified_base 14: mod_base = OTHER; note = 2'-O-methyl modified nucleotide
  modified_base 15: mod_base = OTHER; note = 2'-O-methyl modified nucleotide
  modified_base 16: mod_base = OTHER; note = 2'-O-methyl modified nucleotide
  modified_base 17: mod_base = OTHER; note = 2'-O-methyl modified nucleotide
  modified_base 18: mod_base = OTHER; note = 2'-O-methyl modified nucleotide
  modified_base 19: mod_base = OTHER; note = 2'-O-methyl modified nucleotide with 3'-phosphorothioate linkage
  modified_base 20: mod_base = OTHER; note = 2'-O-methyl modified nucleotide with 3'-phosphorothioate linkage
  modified_base 21: mod_base = OTHER; note = 2'-O-methyl modified nucleotide
ggcgtggatggctccgtgtac

SEQ ID NO: 372 - RNA, 21 nt, synthetic construct
  source 1..21: mol_type = other RNA
  modified_base 1: mod_base = OTHER; note = 2'-O-methyl modified nucleotide with 3'-phosphorothioate linkage
  modified_base 2: mod_base = OTHER; note = 2'-O-methyl modified nucleotide with 3'-phosphorothioate linkage
  modified_base 3: mod_base = OTHER; note = 2'-O-methyl modified nucleotide
  modified_base 4: mod_base = OTHER; note = 2'-O-methyl modified nucleotide
  modified_base 5: mod_base = OTHER; note = 2'-O-methyl modified nucleotide
  modified_base 6: mod_base = OTHER; note = 2'-O-methyl modified nucleotide
  modified_base 7: mod_base = OTHER; note = 2'-fluoro modified nucleotide
  modified_base 8: mod_base = OTHER; note = 2'-O-methyl modified nucleotide
  modified_base 9: mod_base = OTHER; note = 2'-fluoro modified nucleotide
  modified_base 10: mod_base = OTHER; note = 2'-fluoro modified nucleotide
  modified_base 11: mod_base = OTHER; note = 2'-fluoro modified nucleotide
  modified_base 12: mod_base = OTHER; note = 2'-O-methyl modified nucleotide
  modified_base 13: mod_base = OTHER; note = 2'-O-methyl modified nucleotide
  modified_base 14: mod_base = OTHER; note = 2'-O-methyl modified nucleotide
  modified_base 15: mod_base = OTHER; note = 2'-O-methyl modified nucleotide
  modified_base 16: mod_base = OTHER; note = 2'-O-methyl modified nucleotide
  modified_base 17: mod_base = OTHER; note = 2'-O-methyl modified nucleotide
  modified_base 18: mod_base = OTHER; note = 2'-O-methyl modified nucleotide
  modified_base 19: mod_base = OTHER; note = 2'-O-methyl modified nucleotide with 3'-phosphorothioate linkage
  modified_base 20: mod_base = OTHER; note = 2'-O-methyl modified nucleotide with 3'-phosphorothioate linkage
  modified_base 21: mod_base = OTHER; note = 2'-O-methyl modified nucleotide
gcgtggatggctccgtgtaca

SEQ ID NO: 373 - RNA, 21 nt, synthetic construct
  source 1..21: mol_type = other RNA
  modified_base 1: mod_base = OTHER; note = 2'-O-methyl modified nucleotide with 3'-phosphorothioate linkage
  modified_base 2: mod_base = OTHER; note = 2'-O-methyl modified nucleotide with 3'-phosphorothioate linkage
  modified_base 3: mod_base = OTHER; note = 2'-O-methyl modified nucleotide
  modified_base 4: mod_base = OTHER; note = 2'-O-methyl modified nucleotide
  modified_base 5: mod_base = OTHER; note = 2'-O-methyl modified nucleotide
  modified_base 6: mod_base = OTHER; note = 2'-O-methyl modified nucleotide
  modified_base 7: mod_base = OTHER; note = 2'-fluoro modified nucleotide
  modified_base 8: mod_base = OTHER; note = 2'-O-methyl modified nucleotide
  modified_base 9: mod_base = OTHER; note = 2'-fluoro modified nucleotide
  modified_base 10: mod_base = OTHER; note = 2'-fluoro modified nucleotide
  modified_base 11: mod_base = OTHER; note = 2'-fluoro modified nucleotide
  modified_base 12: mod_base = OTHER; note = 2'-O-methyl modified nucleotide
  modified_base 13: mod_base = OTHER; note = 2'-O-methyl modified nucleotide
  modified_base 14: mod_base = OTHER; note = 2'-O-methyl modified nucleotide
  modified_base 15: mod_base = OTHER; note = 2'-O-methyl modified nucleotide
  modified_base 16: mod_base = OTHER; note = 2'-O-methyl modified nucleotide
  modified_base 17: mod_base = OTHER; note = 2'-O-methyl modified nucleotide
  modified_base 18: mod_base = OTHER; note = 2'-O-methyl modified nucleotide
  modified_base 19: mod_base = OTHER; note = 2'-O-methyl modified nucleotide with 3'-phosphorothioate linkage
  modified_base 20: mod_base = OTHER; note = 2'-O-methyl modified nucleotide with 3'-phosphorothioate linkage
  modified_base 21: mod_base = OTHER; note = 2'-O-methyl modified nucleotide
ggatggctccgtgtacaagct

SEQ ID NO: 374 - RNA, 21 nt, synthetic construct
  source 1..21: mol_type = other RNA
  modified_base 1: mod_base = OTHER; note = 2'-O-methyl modified nucleotide with 3'-phosphorothioate linkage
  modified_base 2: mod_base = OTHER; note = 2'-O-methyl modified nucleotide with 3'-phosphorothioate linkage
  modified_base 3: mod_base = OTHER; note = 2'-O-methyl modified nucleotide
  modified_base 4: mod_base = OTHER; note = 2'-O-methyl modified nucleotide
  modified_base 5: mod_base = OTHER; note = 2'-O-methyl modified nucleotide
  modified_base 6: mod_base = OTHER; note = 2'-O-methyl modified nucleotide
  modified_base 7: mod_base = OTHER; note = 2'-fluoro modified nucleotide
  modified_base 8: mod_base = OTHER; note = 2'-O-methyl modified nucleotide
  modified_base 9: mod_base = OTHER; note = 2'-fluoro modified nucleotide
  modified_base 10: mod_base = OTHER; note = 2'-fluoro modified nucleotide
  modified_base 11: mod_base = OTHER; note = 2'-fluoro modified nucleotide
  modified_base 12: mod_base = OTHER; note = 2'-O-methyl modified nucleotide
  modified_base 13: mod_base = OTHER; note = 2'-O-methyl modified nucleotide
  modified_base 14: mod_base = OTHER; note = 2'-O-methyl modified nucleotide
  modified_base 15: mod_base = OTHER; note = 2'-O-methyl modified nucleotide
  modified_base 16: mod_base = OTHER; note = 2'-O-methyl modified nucleotide
  modified_base 17: mod_base = OTHER; note = 2'-O-methyl modified nucleotide
  modified_base 18: mod_base = OTHER; note = 2'-O-methyl modified nucleotide
  modified_base 19: mod_base = OTHER; note = 2'-O-methyl modified nucleotide with 3'-phosphorothioate linkage
  modified_base 20: mod_base = OTHER; note = 2'-O-methyl modified nucleotide with 3'-phosphorothioate linkage
  modified_base 21: mod_base = OTHER; note = 2'-O-methyl modified nucleotide
gacgcccagctgcgagatcac

SEQ ID NO: 375 - RNA, 21 nt, synthetic construct
  source 1..21: mol_type = other RNA
  modified_base 1: mod_base = OTHER; note = 2'-O-methyl modified nucleotide with 3'-phosphorothioate linkage
  modified_base 2: mod_base = OTHER; note = 2'-O-methyl modified nucleotide with 3'-phosphorothioate linkage
  modified_base 3: mod_base = OTHER; note = 2'-O-methyl modified nucleotide
  modified_base 4: mod_base = OTHER; note = 2'-O-methyl modified nucleotide
  modified_base 5: mod_base = OTHER; note = 2'-O-methyl modified nucleotide
  modified_base 6: mod_base = OTHER; note = 2'-O-methyl modified nucleotide
  modified_base 7: mod_base = OTHER; note = 2'-fluoro modified nucleotide
  modified_base 8: mod_base = OTHER; note = 2'-O-methyl modified nucleotide
  modified_base 9: mod_base = OTHER; note = 2'-fluoro modified nucleotide
  modified_base 10: mod_base = OTHER; note = 2'-fluoro modified nucleotide
  modified_base 11: mod_base = OTHER; note = 2'-fluoro modified nucleotide
  modified_base 12: mod_base = OTHER; note = 2'-O-methyl modified nucleotide
  modified_base 13: mod_base = OTHER; note = 2'-O-methyl modified nucleotide
  modified_base 14: mod_base = OTHER; note = 2'-O-methyl modified nucleotide
  modified_base 15: mod_base = OTHER; note = 2'-O-methyl modified nucleotide
  modified_base 16: mod_base = OTHER; note = 2'-O-methyl modified nucleotide
  modified_base 17: mod_base = OTHER; note = 2'-O-methyl modified nucleotide
  modified_base 18: mod_base = OTHER; note = 2'-O-methyl modified nucleotide
  modified_base 19: mod_base = OTHER; note = 2'-O-methyl modified nucleotide with 3'-phosphorothioate linkage
  modified_base 20: mod_base = OTHER; note = 2'-O-methyl modified nucleotide with 3'-phosphorothioate linkage
  modified_base 21: mod_base = OTHER; note = 2'-O-methyl modified nucleotide
cgagatcaccttcatcgagtc

SEQ ID NO: 376 - RNA, 21 nt, synthetic construct
  source 1..21: mol_type = other RNA
  modified_base 1: mod_base = OTHER; note = 2'-O-methyl modified nucleotide with 3'-phosphorothioate linkage
  modified_base 2: mod_base = OTHER; note = 2'-O-methyl modified nucleotide with 3'-phosphorothioate linkage
  modified_base 3: mod_base = OTHER; note = 2'-O-methyl modified nucleotide
  modified_base 4: mod_base = OTHER; note = 2'-O-methyl modified nucleotide
  modified_base 5: mod_base = OTHER; note = 2'-O-methyl modified nucleotide
  modified_base 6: mod_base = OTHER; note = 2'-O-methyl modified nucleotide
  modified_base 7: mod_base = OTHER; note = 2'-fluoro modified nucleotide
  modified_base 8: mod_base = OTHER; note = 2'-O-methyl modified nucleotide
  modified_base 9: mod_base = OTHER; note = 2'-fluoro modified nucleotide
  modified_base 10: mod_base = OTHER; note = 2'-fluoro modified nucleotide
  modified_base 11: mod_base = OTHER; note = 2'-fluoro modified nucleotide
  modified_base 12: mod_base = OTHER; note = 2'-O-methyl modified nucleotide
  modified_base 13: mod_base = OTHER; note = 2'-O-methyl modified nucleotide
  modified_base 14: mod_base = OTHER; note = 2'-O-methyl modified nucleotide
  modified_base 15: mod_base = OTHER; note = 2'-O-methyl modified nucleotide
  modified_base 16: mod_base = OTHER; note = 2'-O-methyl modified nucleotide
  modified_base 17: mod_base = OTHER; note = 2'-O-methyl modified nucleotide
  modified_base 18: mod_base = OTHER; note = 2'-O-methyl modified nucleotide
  modified_base 19: mod_base = OTHER; note = 2'-O-methyl modified nucleotide with 3'-phosphorothioate linkage
  modified_base 20: mod_base = OTHER; note = 2'-O-methyl modified nucleotide with 3'-phosphorothioate linkage
  modified_base 21: mod_base = OTHER; note = 2'-O-methyl modified nucleotide
gatcaccttcatcgagtcgga

SEQ ID NO: 377 - RNA, 21 nt, synthetic construct
  source 1..21: mol_type = other RNA
  modified_base 1: mod_base = OTHER; note = 2'-O-methyl modified nucleotide with 3'-phosphorothioate linkage
  modified_base 2: mod_base = OTHER; note = 2'-O-methyl modified nucleotide with 3'-phosphorothioate linkage
  modified_base 3: mod_base = OTHER; note = 2'-O-methyl modified nucleotide
  modified_base 4: mod_base = OTHER; note = 2'-O-methyl modified nucleotide
  modified_base 5: mod_base = OTHER; note = 2'-O-methyl modified nucleotide
  modified_base 6: mod_base = OTHER; note = 2'-O-methyl modified nucleotide
  modified_base 7: mod_base = OTHER; note = 2'-fluoro modified nucleotide
  modified_base 8: mod_base = OTHER; note = 2'-O-methyl modified nucleotide
  modified_base 9: mod_base = OTHER; note = 2'-fluoro modified nucleotide
  modified_base 10: mod_base = OTHER; note = 2'-fluoro modified nucleotide
  modified_base 11: mod_base = OTHER; note = 2'-fluoro modified nucleotide
  modified_base 12: mod_base = OTHER; note = 2'-O-methyl modified nucleotide
  modified_base 13: mod_base = OTHER; note = 2'-O-methyl modified nucleotide
  modified_base 14: mod_base = OTHER; note = 2'-O-methyl modified nucleotide
  modified_base 15: mod_base = OTHER; note = 2'-O-methyl modified nucleotide
  modified_base 16: mod_base = OTHER; note = 2'-O-methyl modified nucleotide
  modified_base 17: mod_base = OTHER; note = 2'-O-methyl modified nucleotide
  modified_base 18: mod_base = OTHER; note = 2'-O-methyl modified nucleotide
  modified_base 19: mod_base = OTHER; note = 2'-O-methyl modified nucleotide with 3'-phosphorothioate linkage
  modified_base 20: mod_base = OTHER; note = 2'-O-methyl modified nucleotide with 3'-phosphorothioate linkage
  modified_base 21: mod_base = OTHER; note = 2'-O-methyl modified nucleotide
atcaccttcatcgagtcggag

SEQ ID NO: 378 - RNA, 21 nt, synthetic construct
  source 1..21: mol_type = other RNA
  modified_base 1: mod_base = OTHER; note = 2'-O-methyl modified nucleotide with 3'-phosphorothioate linkage
  modified_base 2: mod_base = OTHER; note = 2'-O-methyl modified nucleotide with 3'-phosphorothioate linkage
  modified_base 3: mod_base = OTHER; note = 2'-O-methyl modified nucleotide
  modified_base 4: mod_base = OTHER; note = 2'-O-methyl modified nucleotide
  modified_base 5: mod_base = OTHER; note = 2'-O-methyl modified nucleotide
  modified_base 6: mod_base = OTHER; note = 2'-O-methyl modified nucleotide
  modified_base 7: mod_base = OTHER; note = 2'-fluoro modified nucleotide
  modified_base 8: mod_base = OTHER; note = 2'-O-methyl modified nucleotide
  modified_base 9: mod_base = OTHER; note = 2'-fluoro modified nucleotide
  modified_base 10: mod_base = OTHER; note = 2'-fluoro modified nucleotide
  modified_base 11: mod_base = OTHER; note = 2'-fluoro modified nucleotide
  modified_base 12: mod_base = OTHER; note = 2'-O-methyl modified nucleotide
  modified_base 13: mod_base = OTHER; note = 2'-O-methyl modified nucleotide
  modified_base 14: mod_base = OTHER; note = 2'-O-methyl modified nucleotide
  modified_base 15: mod_base = OTHER; note = 2'-O-methyl modified nucleotide
  modified_base 16: mod_base = OTHER; note = 2'-O-methyl modified nucleotide
  modified_base 17: mod_base = OTHER; note = 2'-O-methyl modified nucleotide
  modified_base 18: mod_base = OTHER; note = 2'-O-methyl modified nucleotide
  modified_base 19: mod_base = OTHER; note = 2'-O-methyl modified nucleotide with 3'-phosphorothioate linkage
  modified_base 20: mod_base = OTHER; note = 2'-O-methyl modified nucleotide with 3'-phosphorothioate linkage
  modified_base 21: mod_base = OTHER; note = 2'-O-methyl modified nucleotide
gatgcatttccacactgtcag

SEQ ID NO: 379 - RNA, 21 nt, synthetic construct
  source 1..21: mol_type = other RNA
  modified_base 1: mod_base = OTHER; note = 2'-O-methyl modified nucleotide with 3'-phosphorothioate linkage
  modified_base 2: mod_base = OTHER; note = 2'-O-methyl modified nucleotide with 3'-phosphorothioate linkage
  modified_base 3: mod_base = OTHER; note = 2'-O-methyl modified nucleotide
  modified_base 4: mod_base = OTHER; note = 2'-O-methyl modified nucleotide
  modified_base 5: mod_base = OTHER; note = 2'-O-methyl modified nucleotide
  modified_base 6: mod_base = OTHER; note = 2'-O-methyl modified nucleotide
  modified_base 7: mod_base = OTHER; note = 2'-fluoro modified nucleotide
  modified_base 8: mod_base = OTHER; note = 2'-O-methyl modified nucleotide
  modified_base 9: mod_base = OTHER; note = 2'-fluoro modified nucleotide
  modified_base 10: mod_base = OTHER; note = 2'-fluoro modified nucleotide
  modified_base 11: mod_base = OTHER; note = 2'-fluoro modified nucleotide
  modified_base 12: mod_base = OTHER; note = 2'-O-methyl modified nucleotide
  modified_base 13: mod_base = OTHER; note = 2'-O-methyl modified nucleotide
  modified_base 14: mod_base = OTHER; note = 2'-O-methyl modified nucleotide
  modified_base 15: mod_base = OTHER; note = 2'-O-methyl modified nucleotide
  modified_base 16: mod_base = OTHER; note = 2'-O-methyl modified nucleotide
  modified_base 17: mod_base = OTHER; note = 2'-O-methyl modified nucleotide
  modified_base 18: mod_base = OTHER; note = 2'-O-methyl modified nucleotide
  modified_base 19: mod_base = OTHER; note = 2'-O-methyl modified nucleotide with 3'-phosphorothioate linkage
  modified_base 20: mod_base = OTHER; note = 2'-O-methyl modified nucleotide with 3'-phosphorothioate linkage
  modified_base 21: mod_base = OTHER; note = 2'-O-methyl modified nucleotide
tgggaactcatcctgtgtggg

SEQ ID NO: 380 - RNA, 21 nt, synthetic construct
  source 1..21: mol_type = other RNA
  modified_base 1: mod_base = OTHER; note = 2'-O-methyl modified nucleotide with 3'-phosphorothioate linkage
  modified_base 2: mod_base = OTHER; note = 2'-O-methyl modified nucleotide with 3'-phosphorothioate linkage
  modified_base 3: mod_base = OTHER; note = 2'-O-methyl modified nucleotide
  modified_base 4: mod_base = OTHER; note = 2'-O-methyl modified nucleotide
  modified_base 5: mod_base = OTHER; note = 2'-O-methyl modified nucleotide
  modified_base 6: mod_base = OTHER; note = 2'-O-methyl modified nucleotide
  modified_base 7: mod_base = OTHER; note = 2'-fluoro modified nucleotide
  modified_base 8: mod_base = OTHER; note = 2'-O-methyl modified nucleotide
  modified_base 9: mod_base = OTHER; note = 2'-fluoro modified nucleotide
  modified_base 10: mod_base = OTHER; note = 2'-fluoro modified nucleotide
  modified_base 11: mod_base = OTHER; note = 2'-fluoro modified nucleotide
  modified_base 12: mod_base = OTHER; note = 2'-O-methyl modified nucleotide
  modified_base 13: mod_base = OTHER; note = 2'-O-methyl modified nucleotide
  modified_base 14: mod_base = OTHER; note = 2'-O-methyl modified nucleotide
  modified_base 15: mod_base = OTHER; note = 2'-O-methyl modified nucleotide
  modified_base 16: mod_base = OTHER; note = 2'-O-methyl modified nucleotide
  modified_base 17: mod_base = OTHER; note = 2'-O-methyl modified nucleotide
  modified_base 18: mod_base = OTHER; note = 2'-O-methyl modified nucleotide
  modified_base 19: mod_base = OTHER; note = 2'-O-methyl modified nucleotide with 3'-phosphorothioate linkage
  modified_base 20: mod_base = OTHER; note = 2'-O-methyl modified nucleotide with 3'-phosphorothioate linkage
  modified_base 21: mod_base = OTHER; note = 2'-O-methyl modified nucleotide
gcagctccaacagcttgacca

SEQ ID NO: 381 - RNA, 21 nt, synthetic construct
  source 1..21: mol_type = other RNA
  modified_base 1: mod_base = OTHER; note = 2'-O-methyl modified nucleotide with 3'-phosphorothioate linkage
  modified_base 2: mod_base = OTHER; note = 2'-O-methyl modified nucleotide with 3'-phosphorothioate linkage
  modified_base 3: mod_base = OTHER; note = 2'-O-methyl modified nucleotide
  modified_base 4: mod_base = OTHER; note = 2'-O-methyl modified nucleotide
  modified_base 5: mod_base = OTHER; note = 2'-O-methyl modified nucleotide
  modified_base 6: mod_base = OTHER; note = 2'-O-methyl modified nucleotide
  modified_base 7: mod_base = OTHER; note = 2'-fluoro modified nucleotide
  modified_base 8: mod_base = OTHER; note = 2'-O-methyl modified nucleotide
  modified_base 9: mod_base = OTHER; note = 2'-fluoro modified nucleotide
  modified_base 10: mod_base = OTHER; note = 2'-fluoro modified nucleotide
  modified_base 11: mod_base = OTHER; note = 2'-fluoro modified nucleotide
  modified_base 12: mod_base = OTHER; note = 2'-O-methyl modified nucleotide
  modified_base 13: mod_base = OTHER; note = 2'-O-methyl modified nucleotide
  modified_base 14: mod_base = OTHER; note = 2'-O-methyl modified nucleotide
  modified_base 15: mod_base = OTHER; note = 2'-O-methyl modified nucleotide
  modified_base 16: mod_base = OTHER; note = 2'-O-methyl modified nucleotide
  modified_base 17: mod_base = OTHER; note = 2'-O-methyl modified nucleotide
  modified_base 18: mod_base = OTHER; note = 2'-O-methyl modified nucleotide
  modified_base 19: mod_base = OTHER; note = 2'-O-methyl modified nucleotide with 3'-phosphorothioate linkage
  modified_base 20: mod_base = OTHER; note = 2'-O-methyl modified nucleotide with 3'-phosphorothioate linkage
  modified_base 21: mod_base = OTHER; note = 2'-O-methyl modified nucleotide
ccaacagcttgaccagaccta

SEQ ID NO: 382 - RNA, 21 nt, synthetic construct
  source 1..21: mol_type = other RNA
  modified_base 1: mod_base = OTHER; note = 2'-O-methyl modified nucleotide with 3'-phosphorothioate linkage
  modified_base 2: mod_base = OTHER; note = 2'-O-methyl modified nucleotide with 3'-phosphorothioate linkage
  modified_base 3: mod_base = OTHER; note = 2'-O-methyl modified nucleotide
  modified_base 4: mod_base = OTHER; note = 2'-O-methyl modified nucleotide
  modified_base 5: mod_base = OTHER; note = 2'-O-methyl modified nucleotide
  modified_base 6: mod_base = OTHER; note = 2'-O-methyl modified nucleotide
  modified_base 7: mod_base = OTHER; note = 2'-fluoro modified nucleotide
  modified_base 8: mod_base = OTHER; note = 2'-O-methyl modified nucleotide
  modified_base 9: mod_base = OTHER; note = 2'-fluoro modified nucleotide
  modified_base 10: mod_base = OTHER; note = 2'-fluoro modified nucleotide
  modified_base 11: mod_base = OTHER; note = 2'-fluoro modified nucleotide
  modified_base 12: mod_base = OTHER; note = 2'-O-methyl modified nucleotide
  modified_base 13: mod_base = OTHER; note = 2'-O-methyl modified nucleotide
  modified_base 14: mod_base = OTHER; note = 2'-O-methyl modified nucleotide
  modified_base 15: mod_base = OTHER; note = 2'-O-methyl modified nucleotide
  modified_base 16: mod_base = OTHER; note = 2'-O-methyl modified nucleotide
  modified_base 17: mod_base = OTHER; note = 2'-O-methyl modified nucleotide
  modified_base 18: mod_base = OTHER; note = 2'-O-methyl modified nucleotide
  modified_base 19: mod_base = OTHER; note = 2'-O-methyl modified nucleotide with 3'-phosphorothioate linkage
  modified_base 20: mod_base = OTHER; note = 2'-O-methyl modified nucleotide with 3'-phosphorothioate linkage
  modified_base 21: mod_base = OTHER; note = 2'-O-methyl modified nucleotide
gcttgtgattctgggatggac

SEQ ID NO: 383 - RNA, 21 nt, synthetic construct
  source 1..21: mol_type = other RNA
  modified_base 1: mod_base = OTHER; note = 2'-O-methyl modified nucleotide with 3'-phosphorothioate linkage
  modified_base 2: mod_base = OTHER; note = 2'-O-methyl modified nucleotide with 3'-phosphorothioate linkage
  modified_base 3: mod_base = OTHER; note = 2'-O-methyl modified nucleotide
  modified_base 4: mod_base = OTHER; note = 2'-O-methyl modified nucleotide
  modified_base 5: mod_base = OTHER; note = 2'-O-methyl modified nucleotide
  modified_base 6: mod_base = OTHER; note = 2'-O-methyl modified nucleotide
  modified_base 7: mod_base = OTHER; note = 2'-fluoro modified nucleotide
  modified_base 8: mod_base = OTHER; note = 2'-O-methyl modified nucleotide
  modified_base 9: mod_base = OTHER; note = 2'-fluoro modified nucleotide
  modified_base 10: mod_base = OTHER; note = 2'-fluoro modified nucleotide
  modified_base 11: mod_base = OTHER; note = 2'-fluoro modified nucleotide
  modified_base 12: mod_base = OTHER; note = 2'-O-methyl modified nucleotide
  modified_base 13: mod_base = OTHER; note = 2'-O-methyl modified nucleotide
  modified_base 14: mod_base = OTHER; note = 2'-O-methyl modified nucleotide
  modified_base 15: mod_base = OTHER; note = 2'-O-methyl modified nucleotide
  modified_base 16: mod_base = OTHER; note = 2'-O-methyl modified nucleotide
  modified_base 17: mod_base = OTHER; note = 2'-O-methyl modified nucleotide
  modified_base 18: mod_base = OTHER; note = 2'-O-methyl modified nucleotide
  modified_base 19: mod_base = OTHER; note = 2'-O-methyl modified nucleotide with 3'-phosphorothioate linkage
  modified_base 20: mod_base = OTHER; note = 2'-O-methyl modified nucleotide with 3'-phosphorothioate linkage
  modified_base 21: mod_base = OTHER; note = 2'-O-methyl modified nucleotide
cttgtgattctgggatggacc

SEQ ID NO: 384 - RNA, 21 nt, synthetic construct
  source 1..21: mol_type = other RNA
  modified_base 1: mod_base = OTHER; note = 2'-O-methyl modified nucleotide with 3'-phosphorothioate linkage
  modified_base 2: mod_base = OTHER; note = 2'-O-methyl modified nucleotide with 3'-phosphorothioate linkage
  modified_base 3: mod_base = OTHER; note = 2'-O-methyl modified nucleotide
  modified_base 4: mod_base = OTHER; note = 2'-O-methyl modified nucleotide
  modified_base 5: mod_base = OTHER; note = 2'-O-methyl modified nucleotide
  modified_base 6: mod_base = OTHER; note = 2'-O-methyl modified nucleotide
  modified_base 7: mod_base = OTHER; note = 2'-fluoro modified nucleotide
  modified_base 8: mod_base = OTHER; note = 2'-O-methyl modified nucleotide
  modified_base 9: mod_base = OTHER; note = 2'-fluoro modified nucleotide
  modified_base 10: mod_base = OTHER; note = 2'-fluoro modified nucleotide
  modified_base 11: mod_base = OTHER; note = 2'-fluoro modified nucleotide
  modified_base 12: mod_base = OTHER; note = 2'-O-methyl modified nucleotide
  modified_base 13: mod_base = OTHER; note = 2'-O-methyl modified nucleotide
  modified_base 14: mod_base = OTHER; note = 2'-O-methyl modified nucleotide
  modified_base 15: mod_base = OTHER; note = 2'-O-methyl modified nucleotide
  modified_base 16: mod_base = OTHER; note = 2'-O-methyl modified nucleotide
  modified_base 17: mod_base = OTHER; note = 2'-O-methyl modified nucleotide
  modified_base 18: mod_base = OTHER; note = 2'-O-methyl modified nucleotide
  modified_base 19: mod_base = OTHER; note = 2'-O-methyl modified nucleotide with 3'-phosphorothioate linkage
  modified_base 20: mod_base = OTHER; note = 2'-O-methyl modified nucleotide with 3'-phosphorothioate linkage
  modified_base 21: mod_base = OTHER; note = 2'-O-methyl modified nucleotide
cgctggctcaggaagaaaccc

SEQ ID NO: 385 - RNA, 21 nt, synthetic construct
  source 1..21: mol_type = other RNA
  modified_base 1: mod_base = OTHER; note = 2'-O-methyl modified nucleotide with 3'-phosphorothioate linkage
  modified_base 2: mod_base = OTHER; note = 2'-O-methyl modified nucleotide with 3'-phosphorothioate linkage
  modified_base 3: mod_base = OTHER; note = 2'-O-methyl modified nucleotide
  modified_base 4: mod_base = OTHER; note = 2'-O-methyl modified nucleotide
  modified_base 5: mod_base = OTHER; note = 2'-O-methyl modified nucleotide
  modified_base 6: mod_base = OTHER; note = 2'-O-methyl modified nucleotide
  modified_base 7: mod_base = OTHER; note = 2'-fluoro modified nucleotide
  modified_base 8: mod_base = OTHER; note = 2'-O-methyl modified nucleotide
  modified_base 9: mod_base = OTHER; note = 2'-fluoro modified nucleotide
  modified_base 10: mod_base = OTHER; note = 2'-fluoro modified nucleotide
  modified_base 11: mod_base = OTHER; note = 2'-fluoro modified nucleotide
  modified_base 12: mod_base = OTHER; note = 2'-O-methyl modified nucleotide
  modified_base 13: mod_base = OTHER; note = 2'-O-methyl modified nucleotide
  modified_base 14: mod_base = OTHER; note = 2'-O-methyl modified nucleotide
  modified_base 15: mod_base = OTHER; note = 2'-O-methyl modified nucleotide
  modified_base 16: mod_base = OTHER; note = 2'-O-methyl modified nucleotide
  modified_base 17: mod_base = OTHER; note = 2'-O-methyl modified nucleotide
  modified_base 18: mod_base = OTHER; note = 2'-O-methyl modified nucleotide
  modified_base 19: mod_base = OTHER; note = 2'-O-methyl modified nucleotide
  modified_base 20: mod_base = OTHER; note = 2'-O-methyl modified nucleotide
  modified_base 21: mod_base = OTHER; note = 2'-O-methyl modified nucleotide
ctgaagaaggtgatgagacgg

SEQ ID NO: 386 - RNA, 21 nt, synthetic construct
  source 1..21: mol_type = other RNA
  modified_base 1: mod_base = OTHER; note = 2'-O-methyl modified nucleotide with 3'-phosphorothioate linkage
  modified_base 2: mod_base = OTHER; note = 2'-O-methyl modified nucleotide with 3'-phosphorothioate linkage
  modified_base 3: mod_base = OTHER; note = 2'-O-methyl modified nucleotide
  modified_base 4: mod_base = OTHER; note = 2'-O-methyl modified nucleotide
  modified_base 5: mod_base = OTHER; note = 2'-O-methyl modified nucleotide
  modified_base 6: mod_base = OTHER; note = 2'-O-methyl modified nucleotide
  modified_base 7: mod_base = OTHER; note = 2'-fluoro modified nucleotide
  modified_base 8: mod_base = OTHER; note = 2'-O-methyl modified nucleotide
  modified_base 9: mod_base = OTHER; note = 2'-fluoro modified nucleotide
  modified_base 10: mod_base = OTHER; note = 2'-fluoro modified nucleotide
  modified_base 11: mod_base = OTHER; note = 2'-fluoro modified nucleotide
  modified_base 12: mod_base = OTHER; note = 2'-O-methyl modified nucleotide
  modified_base 13: mod_base = OTHER; note = 2'-O-methyl modified nucleotide
  modified_base 14: mod_base = OTHER; note = 2'-O-methyl modified nucleotide
  modified_base 15: mod_base = OTHER; note = 2'-O-methyl modified nucleotide
  modified_base 16: mod_base = OTHER; note = 2'-O-methyl modified nucleotide
  modified_base 17: mod_base = OTHER; note = 2'-O-methyl modified nucleotide
  modified_base 18: mod_base = OTHER; note = 2'-O-methyl modified nucleotide
  modified_base 19: mod_base = OTHER; note = 2'-O-methyl modified nucleotide
  modified_base 20: mod_base = OTHER; note = 2'-O-methyl modified nucleotide
  modified_base 21: mod_base = OTHER; note = 2'-O-methyl modified nucleotide
gaagaaggtgatgagacggat

SEQ ID NO: 387 - RNA, 21 nt, synthetic construct
  source 1..21: mol_type = other RNA
  modified_base 1: mod_base = OTHER; note = 2'-O-methyl modified nucleotide with 3'-phosphorothioate linkage
  modified_base 2: mod_base = OTHER; note = 2'-O-methyl modified nucleotide with 3'-phosphorothioate linkage
  modified_base 3: mod_base = OTHER; note = 2'-O-methyl modified nucleotide
  modified_base 4: mod_base = OTHER; note = 2'-O-methyl modified nucleotide
  modified_base 5: mod_base = OTHER; note = 2'-O-methyl modified nucleotide
  modified_base 6: mod_base = OTHER; note = 2'-O-methyl modified nucleotide
  modified_base 7: mod_base = OTHER; note = 2'-fluoro modified nucleotide
  modified_base 8: mod_base = OTHER; note = 2'-O-methyl modified nucleotide
  modified_base 9: mod_base = OTHER; note = 2'-fluoro modified nucleotide
  modified_base 10: mod_base = OTHER; note = 2'-fluoro modified nucleotide
  modified_base 11: mod_base = OTHER; note = 2'-fluoro modified nucleotide
  modified_base 12: mod_base = OTHER; note = 2'-O-methyl modified nucleotide
  modified_base 13: mod_base = OTHER; note = 2'-O-methyl modified nucleotide
  modified_base 14: mod_base = OTHER; note = 2'-O-methyl modified nucleotide
  modified_base 15: mod_base = OTHER; note = 2'-O-methyl modified nucleotide
  modified_base 16: mod_base = OTHER; note = 2'-O-methyl modified nucleotide
  modified_base 17: mod_base = OTHER; note = 2'-O-methyl modified nucleotide
  modified_base 18: mod_base = OTHER; note = 2'-O-methyl modified nucleotide
  modified_base 19: mod_base = OTHER; note = 2'-O-methyl modified nucleotide
  modified_base 20: mod_base = OTHER; note = 2'-O-methyl modified nucleotide
  modified_base 21: mod_base = OTHER; note = 2'-O-methyl modified nucleotide
tgaagaggccagtgtgaagat

SEQ ID NO: 388 - RNA, 21 nt, synthetic construct
  source 1..21: mol_type = other RNA
  modified_base 1: mod_base = OTHER; note = 2'-O-methyl modified nucleotide with 3'-phosphorothioate linkage
  modified_base 2: mod_base = OTHER; note = 2'-O-methyl modified nucleotide with 3'-phosphorothioate linkage
  modified_base 3: mod_base = OTHER; note = 2'-O-methyl modified nucleotide
  modified_base 4: mod_base = OTHER; note = 2'-O-methyl modified nucleotide
  modified_base 5: mod_base = OTHER; note = 2'-O-methyl modified nucleotide
  modified_base 6: mod_base = OTHER; note = 2'-O-methyl modified nucleotide
  modified_base 7: mod_base = OTHER; note = 2'-fluoro modified nucleotide
  modified_base 8: mod_base = OTHER; note = 2'-O-methyl modified nucleotide
  modified_base 9: mod_base = OTHER; note = 2'-fluoro modified nucleotide
  modified_base 10: mod_base = OTHER; note = 2'-fluoro modified nucleotide
  modified_base 11: mod_base = OTHER; note = 2'-fluoro modified nucleotide
  modified_base 12: mod_base = OTHER; note = 2'-O-methyl modified nucleotide
  modified_base 13: mod_base = OTHER; note = 2'-O-methyl modified nucleotide
  modified_base 14: mod_base = OTHER; note = 2'-O-methyl modified nucleotide
  modified_base 15: mod_base = OTHER; note = 2'-O-methyl modified nucleotide
  modified_base 16: mod_base = OTHER; note = 2'-O-methyl modified nucleotide
  modified_base 17: mod_base = OTHER; note = 2'-O-methyl modified nucleotide
  modified_base 18: mod_base = OTHER; note = 2'-O-methyl modified nucleotide
  modified_base 19: mod_base = OTHER; note = 2'-O-methyl modified nucleotide
  modified_base 20: mod_base = OTHER; note = 2'-O-methyl modified nucleotide
  modified_base 21: mod_base = OTHER; note = 2'-O-methyl modified nucleotide
aagaggccagtgtgaagatgc

SEQ ID NO: 389 - RNA, 21 nt, synthetic construct
  source 1..21: mol_type = other RNA
  modified_base 1: mod_base = OTHER; note = 2'-O-methyl modified nucleotide with 3'-phosphorothioate linkage
  modified_base 2: mod_base = OTHER; note = 2'-O-methyl modified nucleotide with 3'-phosphorothioate linkage
  modified_base 3: mod_base = OTHER; note = 2'-O-methyl modified nucleotide
  modified_base 4: mod_base = OTHER; note = 2'-O-methyl modified nucleotide
  modified_base 5: mod_base = OTHER; note = 2'-O-methyl modified nucleotide
  modified_base 6: mod_base = OTHER; note = 2'-O-methyl modified nucleotide
  modified_base 7: mod_base = OTHER; note = 2'-fluoro modified nucleotide
  modified_base 8: mod_base = OTHER; note = 2'-O-methyl modified nucleotide
  modified_base 9: mod_base = OTHER; note = 2'-fluoro modified nucleotide
  modified_base 10: mod_base = OTHER; note = 2'-fluoro modified nucleotide
  modified_base 11: mod_base = OTHER; note = 2'-fluoro modified nucleotide
  modified_base 12: mod_base = OTHER; note = 2'-O-methyl modified nucleotide
  modified_base 13: mod_base = OTHER; note = 2'-O-methyl modified nucleotide
  modified_base 14: mod_base = OTHER; note = 2'-O-methyl modified nucleotide
  modified_base 15: mod_base = OTHER; note = 2'-O-methyl modified nucleotide
  modified_base 16: mod_base = OTHER; note = 2'-O-methyl modified nucleotide
  modified_base 17: mod_base = OTHER; note = 2'-O-methyl modified nucleotide
  modified_base 18: mod_base = OTHER; note = 2'-O-methyl modified nucleotide
  modified_base 19: mod_base = OTHER; note = 2'-O-methyl modified nucleotide
  modified_base 20: mod_base = OTHER; note = 2'-O-methyl modified nucleotide
  modified_base 21: mod_base = OTHER; note = 2'-O-methyl modified nucleotide
gctgcccacctacgtgcgctc

SEQ ID NO: 390 - RNA, 21 nt, synthetic construct
  source 1..21: mol_type = other RNA
  modified_base 1: mod_base = OTHER; note = 2'-O-methyl modified nucleotide with 3'-phosphorothioate linkage
  modified_base 2: mod_base = OTHER; note = 2'-O-methyl modified nucleotide with 3'-phosphorothioate linkage
  modified_base 3: mod_base = OTHER; note = 2'-O-methyl modified nucleotide
  modified_base 4: mod_base = OTHER; note = 2'-O-methyl modified nucleotide
  modified_base 5: mod_base = OTHER; note = 2'-O-methyl modified nucleotide
  modified_base 6: mod_base = OTHER; note = 2'-O-methyl modified nucleotide
  modified_base 7: mod_base = OTHER; note = 2'-fluoro modified nucleotide
  modified_base 8: mod_base = OTHER; note = 2'-O-methyl modified nucleotide
  modified_base 9: mod_base = OTHER; note = 2'-fluoro modified nucleotide
  modified_base 10: mod_base = OTHER; note = 2'-fluoro modified nucleotide
  modified_base 11: mod_base = OTHER; note = 2'-fluoro modified nucleotide
  modified_base 12: mod_base = OTHER; note = 2'-O-methyl modified nucleotide
  modified_base 13: mod_base = OTHER; note = 2'-O-methyl modified nucleotide
  modified_base 14: mod_base = OTHER; note = 2'-O-methyl modified nucleotide
  modified_base 15: mod_base = OTHER; note = 2'-O-methyl modified nucleotide
  modified_base 16: mod_base = OTHER; note = 2'-O-methyl modified nucleotide
  modified_base 17: mod_base = OTHER; note = 2'-O-methyl modified nucleotide
  modified_base 18: mod_base = OTHER; note = 2'-O-methyl modified nucleotide
  modified_base 19: mod_base = OTHER; note = 2'-O-methyl modified nucleotide
  modified_base 20: mod_base = OTHER; note = 2'-O-methyl modified nucleotide
  modified_base 21: mod_base = OTHER; note = 2'-O-methyl modified nucleotide
gtgaaggtgggagaaggtgag

SEQ ID NO: 391 - RNA, 21 nt, synthetic construct
  source 1..21: mol_type = other RNA
  modified_base 1: mod_base = OTHER; note = 2'-O-methyl modified nucleotide with 3'-phosphorothioate linkage
  modified_base 2: mod_base = OTHER; note = 2'-O-methyl modified nucleotide with 3'-phosphorothioate linkage
  modified_base 3: mod_base = OTHER; note = 2'-O-methyl modified nucleotide
  modified_base 4: mod_base = OTHER; note = 2'-O-methyl modified nucleotide
  modified_base 5: mod_base = OTHER; note = 2'-O-methyl modified nucleotide
  modified_base 6: mod_base = OTHER; note = 2'-O-methyl modified nucleotide
  modified_base 7: mod_base = OTHER; note = 2'-fluoro modified nucleotide
  modified_base 8: mod_base = OTHER; note = 2'-O-methyl modified nucleotide
  modified_base 9: mod_base = OTHER; note = 2'-fluoro modified nucleotide
  modified_base 10: mod_base = OTHER; note = 2'-fluoro modified nucleotide
  modified_base 11: mod_base = OTHER; note = 2'-fluoro modified nucleotide
  modified_base 12: mod_base = OTHER; note = 2'-O-methyl modified nucleotide
  modified_base 13: mod_base = OTHER; note = 2'-O-methyl modified nucleotide
  modified_base 14: mod_base = OTHER; note = 2'-O-methyl modified nucleotide
  modified_base 15: mod_base = OTHER; note = 2'-O-methyl modified nucleotide
  modified_base 16: mod_base = OTHER; note = 2'-O-methyl modified nucleotide
  modified_base 17: mod_base = OTHER; note = 2'-O-methyl modified nucleotide
  modified_base 18: mod_base = OTHER; note = 2'-O-methyl modified nucleotide
  modified_base 19: mod_base = OTHER; note = 2'-O-methyl modified nucleotide
  modified_base 20: mod_base = OTHER; note = 2'-O-methyl modified nucleotide
  modified_base 21: mod_base = OTHER; note = 2'-O-methyl modified nucleotide
ggagcgtgaagaccaaacacc

SEQ ID NO: 392 - RNA, 21 nt, synthetic construct
  source 1..21: mol_type = other RNA
  modified_base 1: mod_base = OTHER; note = 2'-O-methyl modified nucleotide with 3'-phosphorothioate linkage
  modified_base 2: mod_base = OTHER; note = 2'-O-methyl modified nucleotide with 3'-phosphorothioate linkage
  modified_base 3: mod_base = OTHER; note = 2'-O-methyl modified nucleotide
  modified_base 4: mod_base = OTHER; note = 2'-O-methyl modified nucleotide
  modified_base 5: mod_base = OTHER; note = 2'-O-methyl modified nucleotide
  modified_base 6: mod_base = OTHER; note = 2'-O-methyl modified nucleotide
  modified_base 7: mod_base = OTHER; note = 2'-fluoro modified nucleotide
  modified_base 8: mod_base = OTHER; note = 2'-O-methyl modified nucleotide
  modified_base 9: mod_base = OTHER; note = 2'-fluoro modified nucleotide
  modified_base 10: mod_base = OTHER; note = 2'-fluoro modified nucleotide
  modified_base 11: mod_base = OTHER; note = 2'-fluoro modified nucleotide
  modified_base 12: mod_base = OTHER; note = 2'-O-methyl modified nucleotide
  modified_base 13: mod_base = OTHER; note = 2'-O-methyl modified nucleotide
  modified_base 14: mod_base = OTHER; note = 2'-O-methyl modified nucleotide
  modified_base 15: mod_base = OTHER; note = 2'-O-methyl modified nucleotide
  modified_base 16: mod_base = OTHER; note = 2'-O-methyl modified nucleotide
  modified_base 17: mod_base = OTHER; note = 2'-O-methyl modified nucleotide
  modified_base 18: mod_base = OTHER; note = 2'-O-methyl modified nucleotide
  modified_base 19: mod_base = OTHER; note = 2'-O-methyl modified nucleotide
  modified_base 20: mod_base = OTHER; note = 2'-O-methyl modified nucleotide
  modified_base 21: mod_base = OTHER; note = 2'-O-methyl modified nucleotide
cgtgaagaccaaacaccagat

SEQ ID NO: 393 - RNA, 21 nt, synthetic construct
  source 1..21: mol_type = other RNA
  modified_base 1: mod_base = OTHER; note = 2'-O-methyl modified nucleotide with 3'-phosphorothioate linkage
  modified_base 2: mod_base = OTHER; note = 2'-O-methyl modified nucleotide with 3'-phosphorothioate linkage
  modified_base 3: mod_base = OTHER; note = 2'-O-methyl modified nucleotide
  modified_base 4: mod_base = OTHER; note = 2'-O-methyl modified nucleotide
  modified_base 5: mod_base = OTHER; note = 2'-O-methyl modified nucleotide
  modified_base 6: mod_base = OTHER; note = 2'-O-methyl modified nucleotide
  modified_base 7: mod_base = OTHER; note = 2'-fluoro modified nucleotide
  modified_base 8: mod_base = OTHER; note = 2'-O-methyl modified nucleotide
  modified_base 9: mod_base = OTHER; note = 2'-fluoro modified nucleotide
  modified_base 10: mod_base = OTHER; note = 2'-fluoro modified nucleotide
  modified_base 11: mod_base = OTHER; note = 2'-fluoro modified nucleotide
  modified_base 12: mod_base = OTHER; note = 2'-O-methyl modified nucleotide
  modified_base 13: mod_base = OTHER; note = 2'-O-methyl modified nucleotide
  modified_base 14: mod_base = OTHER; note = 2'-O-methyl modified nucleotide
  modified_base 15: mod_base = OTHER; note = 2'-O-methyl modified nucleotide
  modified_base 16: mod_base = OTHER; note = 2'-O-methyl modified nucleotide
  modified_base 17: mod_base = OTHER; note = 2'-O-methyl modified nucleotide
  modified_base 18: mod_base = OTHER; note = 2'-O-methyl modified nucleotide
  modified_base 19: mod_base = OTHER; note = 2'-O-methyl modified nucleotide
  modified_base 20: mod_base = OTHER; note = 2'-O-methyl modified nucleotide
  modified_base 21: mod_base = OTHER; note = 2'-O-methyl modified nucleotide
tgaagaccaaacaccagatgt

SEQ ID NO: 394 - RNA, 21 nt, synthetic construct
  source 1..21: mol_type = other RNA
  modified_base 1: mod_base = OTHER; note = 2'-O-methyl modified nucleotide with 3'-phosphorothioate linkage
  modified_base 2: mod_base = OTHER; note = 2'-O-methyl modified nucleotide with 3'-phosphorothioate linkage
  modified_base 3: mod_base = OTHER; note = 2'-O-methyl modified nucleotide
  modified_base 4: mod_base = OTHER; note = 2'-O-methyl modified nucleotide
  modified_base 5: mod_base = OTHER; note = 2'-O-methyl modified nucleotide
  modified_base 6: mod_base = OTHER; note = 2'-O-methyl modified nucleotide
  modified_base 7: mod_base = OTHER; note = 2'-fluoro modified nucleotide
  modified_base 8: mod_base = OTHER; note = 2'-O-methyl modified nucleotide
  modified_base 9: mod_base = OTHER; note = 2'-fluoro modified nucleotide
  modified_base 10: mod_base = OTHER; note = 2'-fluoro modified nucleotide
  modified_base 11: mod_base = OTHER; note = 2'-fluoro modified nucleotide
  modified_base 12: mod_base = OTHER; note = 2'-O-methyl modified nucleotide
  modified_base 13: mod_base = OTHER; note = 2'-O-methyl modified nucleotide
  modified_base 14: mod_base = OTHER; note = 2'-O-methyl modified nucleotide
  modified_base 15: mod_base = OTHER; note = 2'-O-methyl modified nucleotide
  modified_base 16: mod_base = OTHER; note = 2'-O-methyl modified nucleotide
  modified_base 17: mod_base = OTHER; note = 2'-O-methyl modified nucleotide
  modified_base 18: mod_base = OTHER; note = 2'-O-methyl modified nucleotide
  modified_base 19: mod_base = OTHER; note = 2'-O-methyl modified nucleotide
  modified_base 20: mod_base = OTHER; note = 2'-O-methyl modified nucleotide
  modified_base 21: mod_base = OTHER; note = 2'-O-methyl modified nucleotide
gaagaccaaacaccagatgta

SEQ ID NO: 395 - RNA, 21 nt, synthetic construct
  source 1..21: mol_type = other RNA
  modified_base 1: mod_base = OTHER; note = 2'-O-methyl modified nucleotide with 3'-phosphorothioate linkage
  modified_base 2: mod_base = OTHER; note = 2'-O-methyl modified nucleotide with 3'-phosphorothioate linkage
  modified_base 3: mod_base = OTHER; note = 2'-O-methyl modified nucleotide
  modified_base 4: mod_base = OTHER; note = 2'-O-methyl modified nucleotide
  modified_base 5: mod_base = OTHER; note = 2'-O-methyl modified nucleotide
  modified_base 6: mod_base = OTHER; note = 2'-O-methyl modified nucleotide
  modified_base 7: mod_base = OTHER; note = 2'-fluoro modified nucleotide
  modified_base 8: mod_base = OTHER; note = 2'-O-methyl modified nucleotide
  modified_base 9: mod_base = OTHER; note = 2'-fluoro modified nucleotide
  modified_base 10: mod_base = OTHER; note = 2'-fluoro modified nucleotide
  modified_base 11: mod_base = OTHER; note = 2'-fluoro modified nucleotide
  modified_base 12: mod_base = OTHER; note = 2'-O-methyl modified nucleotide
  modified_base 13: mod_base = OTHER; note = 2'-O-methyl modified nucleotide
  modified_base 14: mod_base = OTHER; note = 2'-O-methyl modified nucleotide
  modified_base 15: mod_base = OTHER; note = 2'-O-methyl modified nucleotide
  modified_base 16: mod_base = OTHER; note = 2'-O-methyl modified nucleotide
  modified_base 17: mod_base = OTHER; note = 2'-O-methyl modified nucleotide
  modified_base 18: mod_base = OTHER; note = 2'-O-methyl modified nucleotide
  modified_base 19: mod_base = OTHER; note = 2'-O-methyl modified nucleotide
  modified_base 20: mod_base = OTHER; note = 2'-O-methyl modified nucleotide
  modified_base 21: mod_base = OTHER; note = 2'-O-methyl modified nucleotide
agaccaaacaccagatgtact

SEQ ID NO: 396 - RNA, 21 nt, synthetic construct
  source 1..21: mol_type = other RNA
  modified_base 1: mod_base = OTHER; note = 2'-O-methyl modified nucleotide with 3'-phosphorothioate linkage
  modified_base 2: mod_base = OTHER; note = 2'-O-methyl modified nucleotide with 3'-phosphorothioate linkage
  modified_base 3: mod_base = OTHER; note = 2'-O-methyl modified nucleotide
  modified_base 4: mod_base = OTHER; note = 2'-O-methyl modified nucleotide
  modified_base 5: mod_base = OTHER; note = 2'-O-methyl modified nucleotide
  modified_base 6: mod_base = OTHER; note = 2'-O-methyl modified nucleotide
  modified_base 7: mod_base = OTHER; note = 2'-fluoro modified nucleotide
  modified_base 8: mod_base = OTHER; note = 2'-O-methyl modified nucleotide
  modified_base 9: mod_base = OTHER; note = 2'-fluoro modified nucleotide
  modified_base 10: mod_base = OTHER; note = 2'-fluoro modified nucleotide
  modified_base 11: mod_base = OTHER; note = 2'-fluoro modified nucleotide
  modified_base 12: mod_base = OTHER; note = 2'-O-methyl modified nucleotide
  modified_base 13: mod_base = OTHER; note = 2'-O-methyl modified nucleotide
  modified_base 14: mod_base = OTHER; note = 2'-O-methyl modified nucleotide
  modified_base 15: mod_base = OTHER; note = 2'-O-methyl modified nucleotide
  modified_base 16: mod_base = OTHER; note = 2'-O-methyl modified nucleotide
  modified_base 17: mod_base = OTHER; note = 2'-O-methyl modified nucleotide
  modified_base 18: mod_base = OTHER; note = 2'-O-methyl modified nucleotide
  modified_base 19: mod_base = OTHER; note = 2'-O-methyl modified nucleotide
  modified_base 20: mod_base = OTHER; note = 2'-O-methyl modified nucleotide
  modified_base 21: mod_base = OTHER; note = 2'-O-methyl modified nucleotide
tgaccggcactgctgagatgc

SEQ ID NO: 397 - RNA, 21 nt, synthetic construct
  source 1..21: mol_type = other RNA
  modified_base 1: mod_base = OTHER; note = 2'-O-methyl modified nucleotide with 3'-phosphorothioate linkage
  modified_base 2: mod_base = OTHER; note = 2'-O-methyl modified nucleotide with 3'-phosphorothioate linkage
  modified_base 3: mod_base = OTHER; note = 2'-O-methyl modified nucleotide
  modified_base 4: mod_base = OTHER; note = 2'-O-methyl modified nucleotide
  modified_base 5: mod_base = OTHER; note = 2'-O-methyl modified nucleotide
  modified_base 6: mod_base = OTHER; note = 2'-O-methyl modified nucleotide
  modified_base 7: mod_base = OTHER; note = 2'-fluoro modified nucleotide
  modified_base 8: mod_base = OTHER; note = 2'-O-methyl modified nucleotide
  modified_base 9: mod_base = OTHER; note = 2'-fluoro modified nucleotide
  modified_base 10: mod_base = OTHER; note = 2'-fluoro modified nucleotide
  modified_base 11: mod_base = OTHER; note = 2'-fluoro modified nucleotide
  modified_base 12: mod_base = OTHER; note = 2'-O-methyl modified nucleotide
  modified_base 13: mod_base = OTHER; note = 2'-O-methyl modified nucleotide
  modified_base 14: mod_base = OTHER; note = 2'-O-methyl modified nucleotide
  modified_base 15: mod_base = OTHER; note = 2'-O-methyl modified nucleotide
  modified_base 16: mod_base = OTHER; note = 2'-O-methyl modified nucleotide
  modified_base 17: mod_base = OTHER; note = 2'-O-methyl modified nucleotide
  modified_base 18: mod_base = OTHER; note = 2'-O-methyl modified nucleotide
  modified_base 19: mod_base = OTHER; note = 2'-O-methyl modified nucleotide
  modified_base 20: mod_base = OTHER; note = 2'-O-methyl modified nucleotide
  modified_base 21: mod_base = OTHER; note = 2'-O-methyl modified nucleotide
gaccggcactgctgagatgct

SEQ ID NO: 398 - RNA, 21 nt, synthetic construct
  source 1..21: mol_type = other RNA
  modified_base 1: mod_base = OTHER; note = 2'-O-methyl modified nucleotide with 3'-phosphorothioate linkage
  modified_base 2: mod_base = OTHER; note = 2'-O-methyl modified nucleotide with 3'-phosphorothioate linkage
  modified_base 3: mod_base = OTHER; note = 2'-O-methyl modified nucleotide
  modified_base 4: mod_base = OTHER; note = 2'-O-methyl modified nucleotide
  modified_base 5: mod_base = OTHER; note = 2'-O-methyl modified nucleotide
  modified_base 6: mod_base = OTHER; note = 2'-O-methyl modified nucleotide
  modified_base 7: mod_base = OTHER; note = 2'-fluoro modified nucleotide
  modified_base 8: mod_base = OTHER; note = 2'-O-methyl modified nucleotide
  modified_base 9: mod_base = OTHER; note = 2'-fluoro modified nucleotide
  modified_base 10: mod_base = OTHER; note = 2'-fluoro modified nucleotide
  modified_base 11: mod_base = OTHER; note = 2'-fluoro modified nucleotide
  modified_base 12: mod_base = OTHER; note = 2'-O-methyl modified nucleotide
  modified_base 13: mod_base = OTHER; note = 2'-O-methyl modified nucleotide
  modified_base 14: mod_base = OTHER; note = 2'-O-methyl modified nucleotide
  modified_base 15: mod_base = OTHER; note = 2'-O-methyl modified nucleotide
  modified_base 16: mod_base = OTHER; note = 2'-O-methyl modified nucleotide
  modified_base 17: mod_base = OTHER; note = 2'-O-methyl modified nucleotide
  modified_base 18: mod_base = OTHER; note = 2'-O-methyl modified nucleotide
  modified_base 19: mod_base = OTHER; note = 2'-O-methyl modified nucleotide
  modified_base 20: mod_base = OTHER; note = 2'-O-methyl modified nucleotide
  modified_base 21: mod_base = OTHER; note = 2'-O-methyl modified nucleotide
cactgctgagatgctcttcga

SEQ ID NO: 399 - RNA, 21 nt, synthetic construct
  source 1..21: mol_type = other RNA
  modified_base 1: mod_base = OTHER; note = 2'-O-methyl modified nucleotide with 3'-phosphorothioate linkage
  modified_base 2: mod_base = OTHER; note = 2'-O-methyl modified nucleotide with 3'-phosphorothioate linkage
  modified_base 3: mod_base = OTHER; note = 2'-O-methyl modified nucleotide
  modified_base 4: mod_base = OTHER; note = 2'-O-methyl modified nucleotide
  modified_base 5: mod_base = OTHER; note = 2'-O-methyl modified nucleotide
  modified_base 6: mod_base = OTHER; note = 2'-O-methyl modified nucleotide
  modified_base 7: mod_base = OTHER; note = 2'-fluoro modified nucleotide
  modified_base 8: mod_base = OTHER; note = 2'-O-methyl modified nucleotide
  modified_base 9: mod_base = OTHER; note = 2'-fluoro modified nucleotide
  modified_base 10: mod_base = OTHER; note = 2'-fluoro modified nucleotide
  modified_base 11: mod_base = OTHER; note = 2'-fluoro modified nucleotide
  modified_base 12: mod_base = OTHER; note = 2'-O-methyl modified nucleotide
  modified_base 13: mod_base = OTHER; note = 2'-O-methyl modified nucleotide
  modified_base 14: mod_base = OTHER; note = 2'-O-methyl modified nucleotide
  modified_base 15: mod_base = OTHER; note = 2'-O-methyl modified nucleotide
  modified_base 16: mod_base = OTHER; note = 2'-O-methyl modified nucleotide
  modified_base 17: mod_base = OTHER; note = 2'-O-methyl modified nucleotide
  modified_base 18: mod_base = OTHER; note = 2'-O-methyl modified nucleotide
  modified_base 19: mod_base = OTHER; note = 2'-O-methyl modified nucleotide
  modified_base 20: mod_base = OTHER; note = 2'-O-methyl modified nucleotide
  modified_base 21: mod_base = OTHER; note = 2'-O-methyl modified nucleotide
actgctgagatgctcttcgac

SEQ ID NO: 400 - RNA, 21 nt, synthetic construct
  source 1..21: mol_type = other RNA
  modified_base 1: mod_base = OTHER; note = 2'-O-methyl modified nucleotide with 3'-phosphorothioate linkage
  modified_base 2: mod_base = OTHER; note = 2'-O-methyl modified nucleotide with 3'-phosphorothioate linkage
  modified_base 3: mod_base = OTHER; note = 2'-O-methyl modified nucleotide
  modified_base 4: mod_base = OTHER; note = 2'-O-methyl modified nucleotide
  modified_base 5: mod_base = OTHER; note = 2'-O-methyl modified nucleotide
  modified_base 6: mod_base = OTHER; note = 2'-O-methyl modified nucleotide
  modified_base 7: mod_base = OTHER; note = 2'-fluoro modified nucleotide
  modified_base 8: mod_base = OTHER; note = 2'-O-methyl modified nucleotide
  modified_base 9: mod_base = OTHER; note = 2'-fluoro modified nucleotide
  modified_base 10: mod_base = OTHER; note = 2'-fluoro modified nucleotide
  modified_base 11: mod_base = OTHER; note = 2'-fluoro modified nucleotide
  modified_base 12: mod_base = OTHER; note = 2'-O-methyl modified nucleotide
  modified_base 13: mod_base = OTHER; note = 2'-O-methyl modified nucleotide
  modified_base 14: mod_base = OTHER; note = 2'-O-methyl modified nucleotide
  modified_base 15: mod_base = OTHER; note = 2'-O-methyl modified nucleotide
  modified_base 16: mod_base = OTHER; note = 2'-O-methyl modified nucleotide
  modified_base 17: mod_base = OTHER; note = 2'-O-methyl modified nucleotide
  modified_base 18: mod_base = OTHER; note = 2'-O-methyl modified nucleotide
  modified_base 19: mod_base = OTHER; note = 2'-O-methyl modified nucleotide
  modified_base 20: mod_base = OTHER; note = 2'-O-methyl modified nucleotide
  modified_base 21: mod_base = OTHER; note = 2'-O-methyl modified nucleotide
tgagatgctcttcgactacat

SEQ ID NO: 401 - RNA, 21 nt, synthetic construct
  source 1..21: mol_type = other RNA
  modified_base 1: mod_base = OTHER; note = 2'-O-methyl modified nucleotide with 3'-phosphorothioate linkage
  modified_base 2: mod_base = OTHER; note = 2'-O-methyl modified nucleotide with 3'-phosphorothioate linkage
  modified_base 3: mod_base = OTHER; note = 2'-O-methyl modified nucleotide
  modified_base 4: mod_base = OTHER; note = 2'-O-methyl modified nucleotide
  modified_base 5: mod_base = OTHER; note = 2'-O-methyl modified nucleotide
  modified_base 6: mod_base = OTHER; note = 2'-O-methyl modified nucleotide
  modified_base 7: mod_base = OTHER; note = 2'-fluoro modified nucleotide
  modified_base 8: mod_base = OTHER; note = 2'-O-methyl modified nucleotide
  modified_base 9: mod_base = OTHER; note = 2'-fluoro modified nucleotide
  modified_base 10: mod_base = OTHER; note = 2'-fluoro modified nucleotide
  modified_base 11: mod_base = OTHER; note = 2'-fluoro modified nucleotide
  modified_base 12: mod_base = OTHER; note = 2'-O-methyl modified nucleotide
  modified_base 13: mod_base = OTHER; note = 2'-O-methyl modified nucleotide
  modified_base 14: mod_base = OTHER; note = 2'-O-methyl modified nucleotide
  modified_base 15: mod_base = OTHER; note = 2'-O-methyl modified nucleotide
  modified_base 16: mod_base = OTHER; note = 2'-O-methyl modified nucleotide
  modified_base 17: mod_base = OTHER; note = 2'-O-methyl modified nucleotide
  modified_base 18: mod_base = OTHER; note = 2'-O-methyl modified nucleotide
  modified_base 19: mod_base = OTHER; note = 2'-O-methyl modified nucleotide
  modified_base 20: mod_base = OTHER; note = 2'-O-methyl modified nucleotide
  modified_base 21: mod_base = OTHER; note = 2'-O-methyl modified nucleotide
tcctggacaagcatcagatga

SEQ ID NO: 402 - RNA, 21 nt, synthetic construct
  source 1..21: mol_type = other RNA
  modified_base 1: mod_base = OTHER; note = 2'-O-methyl modified nucleotide with 3'-phosphorothioate linkage
  modified_base 2: mod_base = OTHER; note = 2'-O-methyl modified nucleotide with 3'-phosphorothioate linkage
  modified_base 3: mod_base = OTHER; note = 2'-O-methyl modified nucleotide
  modified_base 4: mod_base = OTHER; note = 2'-O-methyl modified nucleotide
  modified_base 5: mod_base = OTHER; note = 2'-O-methyl modified nucleotide
  modified_base 6: mod_base = OTHER; note = 2'-O-methyl modified nucleotide
  modified_base 7: mod_base = OTHER; note = 2'-fluoro modified nucleotide
  modified_base 8: mod_base = OTHER; note = 2'-O-methyl modified nucleotide
  modified_base 9: mod_base = OTHER; note = 2'-fluoro modified nucleotide
  modified_base 10: mod_base = OTHER; note = 2'-fluoro modified nucleotide
  modified_base 11: mod_base = OTHER; note = 2'-fluoro modified nucleotide
  modified_base 12: mod_base = OTHER; note = 2'-O-methyl modified nucleotide
  modified_base 13: mod_base = OTHER; note = 2'-O-methyl modified nucleotide
  modified_base 14: mod_base = OTHER; note = 2'-O-methyl modified nucleotide
  modified_base 15: mod_base = OTHER; note = 2'-O-methyl modified nucleotide
  modified_base 16: mod_base = OTHER; note = 2'-O-methyl modified nucleotide
  modified_base 17: mod_base = OTHER; note = 2'-O-methyl modified nucleotide
  modified_base 18: mod_base = OTHER; note = 2'-O-methyl modified nucleotide
  modified_base 19: mod_base = OTHER; note = 2'-O-methyl modified nucleotide
  modified_base 20: mod_base = OTHER; note = 2'-O-methyl modified nucleotide
  modified_base 21: mod_base = OTHER; note = 2'-O-methyl modified nucleotide
gaagacatcgataagggcatc

SEQ ID NO: 403 - RNA, 21 nt, synthetic construct
  source 1..21: mol_type = other RNA
  modified_base 1: mod_base = OTHER; note = 2'-O-methyl modified nucleotide with 3'-phosphorothioate linkage
  modified_base 2: mod_base = OTHER; note = 2'-O-methyl modified nucleotide with 3'-phosphorothioate linkage
  modified_base 3: mod_base = OTHER; note = 2'-O-methyl modified nucleotide
  modified_base 4: mod_base = OTHER; note = 2'-O-methyl modified nucleotide
  modified_base 5: mod_base = OTHER; note = 2'-O-methyl modified nucleotide
  modified_base 6: mod_base = OTHER; note = 2'-O-methyl modified nucleotide
  modified_base 7: mod_base = OTHER; note = 2'-fluoro modified nucleotide
  modified_base 8: mod_base = OTHER; note = 2'-O-methyl modified nucleotide
  modified_base 9: mod_base = OTHER; note = 2'-fluoro modified nucleotide
  modified_base 10: mod_base = OTHER; note = 2'-fluoro modified nucleotide
  modified_base 11: mod_base = OTHER; note = 2'-fluoro modified nucleotide
  modified_base 12: mod_base = OTHER; note = 2'-O-methyl modified nucleotide
  modified_base 13: mod_base = OTHER; note = 2'-O-methyl modified nucleotide
  modified_base 14: mod_base = OTHER; note = 2'-O-methyl modified nucleotide
  modified_base 15: mod_base = OTHER; note = 2'-O-methyl modified nucleotide
  modified_base 16: mod_base = OTHER; note = 2'-O-methyl modified nucleotide
  modified_base 17: mod_base = OTHER; note = 2'-O-methyl modified nucleotide
  modified_base 18: mod_base = OTHER; note = 2'-O-methyl modified nucleotide
  modified_base 19: mod_base = OTHER; note = 2'-O-methyl modified nucleotide
  modified_base 20: mod_base = OTHER; note = 2'-O-methyl modified nucleotide
  modified_base 21: mod_base = OTHER; note = 2'-O-methyl modified nucleotide
agacatcgataagggcatcct

SEQ ID NO: 404 - RNA, 21 nt, synthetic construct
  source 1..21: mol_type = other RNA
  modified_base 1: mod_base = OTHER; note = 2'-O-methyl modified nucleotide with 3'-phosphorothioate linkage
  modified_base 2: mod_base = OTHER; note = 2'-O-methyl modified nucleotide with 3'-phosphorothioate linkage
  modified_base 3: mod_base = OTHER; note = 2'-O-methyl modified nucleotide
  modified_base 4: mod_base = OTHER; note = 2'-O-methyl modified nucleotide
  modified_base 5: mod_base = OTHER; note = 2'-O-methyl modified nucleotide
  modified_base 6: mod_base = OTHER; note = 2'-O-methyl modified nucleotide
  modified_base 7: mod_base = OTHER; note = 2'-fluoro modified nucleotide
  modified_base 8: mod_base = OTHER; note = 2'-O-methyl modified nucleotide
  modified_base 9: mod_base = OTHER; note = 2'-fluoro modified nucleotide
  modified_base 10: mod_base = OTHER; note = 2'-fluoro modified nucleotide
  modified_base 11: mod_base = OTHER; note = 2'-fluoro modified nucleotide
  modified_base 12: mod_base = OTHER; note = 2'-O-methyl modified nucleotide
  modified_base 13: mod_base = OTHER; note = 2'-O-methyl modified nucleotide
  modified_base 14: mod_base = OTHER; note = 2'-O-methyl modified nucleotide
  modified_base 15: mod_base = OTHER; note = 2'-O-methyl modified nucleotide
  modified_base 16: mod_base = OTHER; note = 2'-O-methyl modified nucleotide
  modified_base 17: mod_base = OTHER; note = 2'-O-methyl modified nucleotide
  modified_base 18: mod_base = OTHER; note = 2'-O-methyl modified nucleotide
  modified_base 19: mod_base = OTHER; note = 2'-O-methyl modified nucleotide
  modified_base 20: mod_base = OTHER; note = 2'-O-methyl modified nucleotide
  modified_base 21: mod_base = OTHER; note = 2'-O-methyl modified nucleotide
gataagggcatccttctcaac

SEQ ID NO: 405 - RNA, 21 nt, synthetic construct
  source 1..21: mol_type = other RNA
  modified_base 1: mod_base = OTHER; note = 2'-O-methyl modified nucleotide with 3'-phosphorothioate linkage
  modified_base 2: mod_base = OTHER; note = 2'-O-methyl modified nucleotide with 3'-phosphorothioate linkage
  modified_base 3: mod_base = OTHER; note = 2'-O-methyl modified nucleotide
  modified_base 4: mod_base = OTHER; note = 2'-O-methyl modified nucleotide
  modified_base 5: mod_base = OTHER; note = 2'-O-methyl modified nucleotide
  modified_base 6: mod_base = OTHER; note = 2'-O-methyl modified nucleotide
  modified_base 7: mod_base = OTHER; note = 2'-fluoro modified nucleotide
  modified_base 8: mod_base = OTHER; note = 2'-O-methyl modified nucleotide
  modified_base 9: mod_base = OTHER; note = 2'-fluoro modified nucleotide
  modified_base 10: mod_base = OTHER; note = 2'-fluoro modified nucleotide
  modified_base 11: mod_base = OTHER; note = 2'-fluoro modified nucleotide
  modified_base 12: mod_base = OTHER; note = 2'-O-methyl modified nucleotide
  modified_base 13: mod_base = OTHER; note = 2'-O-methyl modified nucleotide
  modified_base 14: mod_base = OTHER; note = 2'-O-methyl modified nucleotide
  modified_base 15: mod_base = OTHER; note = 2'-O-methyl modified nucleotide
  modified_base 16: mod_base = OTHER; note = 2'-O-methyl modified nucleotide
  modified_base 17: mod_base = OTHER; note = 2'-O-methyl modified nucleotide
  modified_base 18: mod_base = OTHER; note = 2'-O-methyl modified nucleotide
  modified_base 19: mod_base = OTHER; note = 2'-O-methyl modified nucleotide
  modified_base 20: mod_base = OTHER; note = 2'-O-methyl modified nucleotide
  modified_base 21: mod_base = OTHER; note = 2'-O-methyl modified nucleotide
agggcatccttctcaactgga

SEQ ID NO: 406 - RNA, 21 nt, synthetic construct
  source 1..21: mol_type = other RNA
  modified_base 1: mod_base = OTHER; note = 2'-O-methyl modified nucleotide with 3'-phosphorothioate linkage
  modified_base 2: mod_base = OTHER; note = 2'-O-methyl modified nucleotide with 3'-phosphorothioate linkage
  modified_base 3: mod_base = OTHER; note = 2'-O-methyl modified nucleotide
  modified_base 4: mod_base = OTHER; note = 2'-O-methyl modified nucleotide
  modified_base 5: mod_base = OTHER; note = 2'-O-methyl modified nucleotide
  modified_base 6: mod_base = OTHER; note = 2'-O-methyl modified nucleotide
  modified_base 7: mod_base = OTHER; note = 2'-fluoro modified nucleotide
  modified_base 8: mod_base = OTHER; note = 2'-O-methyl modified nucleotide
  modified_base 9: mod_base = OTHER; note = 2'-fluoro modified nucleotide
  modified_base 10: mod_base = OTHER; note = 2'-fluoro modified nucleotide
  modified_base 11: mod_base = OTHER; note = 2'-fluoro modified nucleotide
  modified_base 12: mod_base = OTHER; note = 2'-O-methyl modified nucleotide
  modified_base 13: mod_base = OTHER; note = 2'-O-methyl modified nucleotide
  modified_base 14: mod_base = OTHER; note = 2'-O-methyl modified nucleotide
  modified_base 15: mod_base = OTHER; note = 2'-O-methyl modified nucleotide
  modified_base 16: mod_base = OTHER; note = 2'-O-methyl modified nucleotide
  modified_base 17: mod_base = OTHER; note = 2'-O-methyl modified nucleotide
  modified_base 18: mod_base = OTHER; note = 2'-O-methyl modified nucleotide
  modified_base 19: mod_base = OTHER; note = 2'-O-methyl modified nucleotide
  modified_base 20: mod_base = OTHER; note = 2'-O-methyl modified nucleotide
  modified_base 21: mod_base = OTHER; note = 2'-O-methyl modified nucleotide
gcatccttctcaactggacca

SEQ ID NO: 407 - RNA, 21 nt, synthetic construct
  source 1..21: mol_type = other RNA
  modified_base 1: mod_base = OTHER; note = 2'-O-methyl modified nucleotide with 3'-phosphorothioate linkage
  modified_base 2: mod_base = OTHER; note = 2'-O-methyl modified nucleotide with 3'-phosphorothioate linkage
  modified_base 3: mod_base = OTHER; note = 2'-O-methyl modified nucleotide
  modified_base 4: mod_base = OTHER; note = 2'-O-methyl modified nucleotide
  modified_base 5: mod_base = OTHER; note = 2'-O-methyl modified nucleotide
  modified_base 6: mod_base = OTHER; note = 2'-O-methyl modified nucleotide
  modified_base 7: mod_base = OTHER; note = 2'-fluoro modified nucleotide
  modified_base 8: mod_base = OTHER; note = 2'-O-methyl modified nucleotide
  modified_base 9: mod_base = OTHER; note = 2'-fluoro modified nucleotide
  modified_base 10: mod_base = OTHER; note = 2'-fluoro modified nucleotide
  modified_base 11: mod_base = OTHER; note = 2'-fluoro modified nucleotide
  modified_base 12: mod_base = OTHER; note = 2'-O-methyl modified nucleotide
  modified_base 13: mod_base = OTHER; note = 2'-O-methyl modified nucleotide
  modified_base 14: mod_base = OTHER; note = 2'-O-methyl modified nucleotide
  modified_base 15: mod_base = OTHER; note = 2'-O-methyl modified nucleotide
  modified_base 16: mod_base = OTHER; note = 2'-O-methyl modified nucleotide
  modified_base 17: mod_base = OTHER; note = 2'-O-methyl modified nucleotide
  modified_base 18: mod_base = OTHER; note = 2'-O-methyl modified nucleotide
  modified_base 19: mod_base = OTHER; note = 2'-O-methyl modified nucleotide
  modified_base 20: mod_base = OTHER; note = 2'-O-methyl modified nucleotide
  modified_base 21: mod_base = OTHER; note = 2'-O-methyl modified nucleotide
caggagcagaagggaacaatg

SEQ ID NO: 408 - RNA, 21 nt, synthetic construct
  source 1..21: mol_type = other RNA
  modified_base 1: mod_base = OTHER; note = 2'-O-methyl modified nucleotide with 3'-phosphorothioate linkage
  modified_base 2: mod_base = OTHER; note = 2'-O-methyl modified nucleotide with 3'-phosphorothioate linkage
  modified_base 3: mod_base = OTHER; note = 2'-O-methyl modified nucleotide
  modified_base 4: mod_base = OTHER; note = 2'-O-methyl modified nucleotide
  modified_base 5: mod_base = OTHER; note = 2'-O-methyl modified nucleotide
  modified_base 6: mod_base = OTHER; note = 2'-O-methyl modified nucleotide
  modified_base 7: mod_base = OTHER; note = 2'-fluoro modified nucleotide
  modified_base 8: mod_base = OTHER; note = 2'-O-methyl modified nucleotide
  modified_base 9: mod_base = OTHER; note = 2'-fluoro modified nucleotide
  modified_base 10: mod_base = OTHER; note = 2'-fluoro modified nucleotide
  modified_base 11: mod_base = OTHER; note = 2'-fluoro modified nucleotide
  modified_base 12: mod_base = OTHER; note = 2'-O-methyl modified nucleotide
  modified_base 13: mod_base = OTHER; note = 2'-O-methyl modified nucleotide
  modified_base 14: mod_base = OTHER; note = 2'-O-methyl modified nucleotide
  modified_base 15: mod_base = OTHER; note = 2'-O-methyl modified nucleotide
  modified_base 16: mod_base = OTHER; note = 2'-O-methyl modified nucleotide
  modified_base 17: mod_base = OTHER; note = 2'-O-methyl modified nucleotide
  modified_base 18: mod_base = OTHER; note = 2'-O-methyl modified nucleotide
  modified_base 19: mod_base = OTHER; note = 2'-O-methyl modified nucleotide
  modified_base 20: mod_base = OTHER; note = 2'-O-methyl modified nucleotide
  modified_base 21: mod_base = OTHER; note = 2'-O-methyl modified nucleotide
ggagcagaagggaacaatgtc

SEQ ID NO: 409 - RNA, 21 nt, synthetic construct
  source 1..21: mol_type = other RNA
  modified_base 1: mod_base = OTHER; note = 2'-O-methyl modified nucleotide with 3'-phosphorothioate linkage
  modified_base 2: mod_base = OTHER; note = 2'-O-methyl modified nucleotide with 3'-phosphorothioate linkage
  modified_base 3: mod_base = OTHER; note = 2'-O-methyl modified nucleotide
  modified_base 4: mod_base = OTHER; note = 2'-O-methyl modified nucleotide
  modified_base 5: mod_base = OTHER; note = 2'-O-methyl modified nucleotide
  modified_base 6: mod_base = OTHER; note = 2'-O-methyl modified nucleotide
  modified_base 7: mod_base = OTHER; note = 2'-fluoro modified nucleotide
  modified_base 8: mod_base = OTHER; note = 2'-O-methyl modified nucleotide
  modified_base 9: mod_base = OTHER; note = 2'-fluoro modified nucleotide
  modified_base 10: mod_base = OTHER; note = 2'-fluoro modified nucleotide
  modified_base 11: mod_base = OTHER; note = 2'-fluoro modified nucleotide
  modified_base 12: mod_base = OTHER; note = 2'-O-methyl modified nucleotide
  modified_base 13: mod_base = OTHER; note = 2'-O-methyl modified nucleotide
  modified_base 14: mod_base = OTHER; note = 2'-O-methyl modified nucleotide
  modified_base 15: mod_base = OTHER; note = 2'-O-methyl modified nucleotide
  modified_base 16: mod_base = OTHER; note = 2'-O-methyl modified nucleotide
  modified_base 17: mod_base = OTHER; note = 2'-O-methyl modified nucleotide
  modified_base 18: mod_base = OTHER; note = 2'-O-methyl modified nucleotide
  modified_base 19: mod_base = OTHER; note = 2'-O-methyl modified nucleotide
  modified_base 20: mod_base = OTHER; note = 2'-O-methyl modified nucleotide
  modified_base 21: mod_base = OTHER; note = 2'-O-methyl modified nucleotide
gagcagaagggaacaatgtcg

SEQ ID NO: 410 - RNA, 21 nt, synthetic construct
  source 1..21: mol_type = other RNA
  modified_base 1: mod_base = OTHER; note = 2'-O-methyl modified nucleotide with 3'-phosphorothioate linkage
  modified_base 2: mod_base = OTHER; note = 2'-O-methyl modified nucleotide with 3'-phosphorothioate linkage
  modified_base 3: mod_base = OTHER; note = 2'-O-methyl modified nucleotide
  modified_base 4: mod_base = OTHER; note = 2'-O-methyl modified nucleotide
  modified_base 5: mod_base = OTHER; note = 2'-O-methyl modified nucleotide
  modified_base 6: mod_base = OTHER; note = 2'-O-methyl modified nucleotide
  modified_base 7: mod_base = OTHER; note = 2'-fluoro modified nucleotide
  modified_base 8: mod_base = OTHER; note = 2'-O-methyl modified nucleotide
  modified_base 9: mod_base = OTHER; note = 2'-fluoro modified nucleotide
  modified_base 10: mod_base = OTHER; note = 2'-fluoro modified nucleotide
  modified_base 11: mod_base = OTHER; note = 2'-fluoro modified nucleotide
  modified_base 12: mod_base = OTHER; note = 2'-O-methyl modified nucleotide
  modified_base 13: mod_base = OTHER; note = 2'-O-methyl modified nucleotide
  modified_base 14: mod_base = OTHER; note = 2'-O-methyl modified nucleotide
  modified_base 15: mod_base = OTHER; note = 2'-O-methyl modified nucleotide
  modified_base 16: mod_base = OTHER; note = 2'-O-methyl modified nucleotide
  modified_base 17: mod_base = OTHER; note = 2'-O-methyl modified nucleotide
  modified_base 18: mod_base = OTHER; note = 2'-O-methyl modified nucleotide
  modified_base 19: mod_base = OTHER; note = 2'-O-methyl modified nucleotide
  modified_base 20: mod_base = OTHER; note = 2'-O-methyl modified nucleotide
  modified_base 21: mod_base = OTHER; note = 2'-O-methyl modified nucleotide
agcagaagggaacaatgtcgt

SEQ ID NO: 411 - RNA, 21 nt, synthetic construct
  source 1..21: mol_type = other RNA
  modified_base 1: mod_base = OTHER; note = 2'-O-methyl modified nucleotide with 3'-phosphorothioate linkage
  modified_base 2: mod_base = OTHER; note = 2'-O-methyl modified nucleotide with 3'-phosphorothioate linkage
  modified_base 3: mod_base = OTHER; note = 2'-O-methyl modified nucleotide
  modified_base 4: mod_base = OTHER; note = 2'-O-methyl modified nucleotide
  modified_base 5: mod_base = OTHER; note = 2'-O-methyl modified nucleotide
  modified_base 6: mod_base = OTHER; note = 2'-O-methyl modified nucleotide
  modified_base 7: mod_base = OTHER; note = 2'-fluoro modified nucleotide
  modified_base 8: mod_base = OTHER; note = 2'-O-methyl modified nucleotide
  modified_base 9: mod_base = OTHER; note = 2'-fluoro modified nucleotide
  modified_base 10: mod_base = OTHER; note = 2'-fluoro modified nucleotide
  modified_base 11: mod_base = OTHER; note = 2'-fluoro modified nucleotide
  modified_base 12: mod_base = OTHER; note = 2'-O-methyl modified nucleotide
  modified_base 13: mod_base = OTHER; note = 2'-O-methyl modified nucleotide
  modified_base 14: mod_base = OTHER; note = 2'-O-methyl modified nucleotide
  modified_base 15: mod_base = OTHER; note = 2'-O-methyl modified nucleotide
  modified_base 16: mod_base = OTHER; note = 2'-O-methyl modified nucleotide
  modified_base 17: mod_base = OTHER; note = 2'-O-methyl modified nucleotide
  modified_base 18: mod_base = OTHER; note = 2'-O-methyl modified nucleotide
  modified_base 19: mod_base = OTHER; note = 2'-O-methyl modified nucleotide
  modified_base 20: mod_base = OTHER; note = 2'-O-methyl modified nucleotide
  modified_base 21: mod_base = OTHER; note = 2'-O-methyl modified nucleotide
cagaagggaacaatgtcgtgg

SEQ ID NO: 412 - RNA, 21 nt, synthetic construct
  source 1..21: mol_type = other RNA
  modified_base 1: mod_base = OTHER; note = 2'-O-methyl modified nucleotide with 3'-phosphorothioate linkage
  modified_base 2: mod_base = OTHER; note = 2'-O-methyl modified nucleotide with 3'-phosphorothioate linkage
  modified_base 3: mod_base = OTHER; note = 2'-O-methyl modified nucleotide
  modified_base 4: mod_base = OTHER; note = 2'-O-methyl modified nucleotide
  modified_base 5: mod_base = OTHER; note = 2'-O-methyl modified nucleotide
  modified_base 6: mod_base = OTHER; note = 2'-O-methyl modified nucleotide
  modified_base 7: mod_base = OTHER; note = 2'-fluoro modified nucleotide
  modified_base 8: mod_base = OTHER; note = 2'-O-methyl modified nucleotide
  modified_base 9: mod_base = OTHER; note = 2'-fluoro modified nucleotide
  modified_base 10: mod_base = OTHER; note = 2'-fluoro modified nucleotide
  modified_base 11: mod_base = OTHER; note = 2'-fluoro modified nucleotide
  modified_base 12: mod_base = OTHER; note = 2'-O-methyl modified nucleotide
  modified_base 13: mod_base = OTHER; note = 2'-O-methyl modified nucleotide
  modified_base 14: mod_base = OTHER; note = 2'-O-methyl modified nucleotide
  modified_base 15: mod_base = OTHER; note = 2'-O-methyl modified nucleotide
  modified_base 16: mod_base = OTHER; note = 2'-O-methyl modified nucleotide
  modified_base 17: mod_base = OTHER; note = 2'-O-methyl modified nucleotide
  modified_base 18: mod_base = OTHER; note = 2'-O-methyl modified nucleotide
  modified_base 19: mod_base = OTHER; note = 2'-O-methyl modified nucleotide
  modified_base 20: mod_base = OTHER; note = 2'-O-methyl modified nucleotide
  modified_base 21: mod_base = OTHER; note = 2'-O-methyl modified nucleotide
agaagggaacaatgtcgtggg

SEQ ID NO: 413 - RNA, 21 nt, synthetic construct
  source 1..21: mol_type = other RNA
  modified_base 1: mod_base = OTHER; note = 2'-O-methyl modified nucleotide with 3'-phosphorothioate linkage
  modified_base 2: mod_base = OTHER; note = 2'-O-methyl modified nucleotide with 3'-phosphorothioate linkage
  modified_base 3: mod_base = OTHER; note = 2'-O-methyl modified nucleotide
  modified_base 4: mod_base = OTHER; note = 2'-O-methyl modified nucleotide
  modified_base 5: mod_base = OTHER; note = 2'-O-methyl modified nucleotide
  modified_base 6: mod_base = OTHER; note = 2'-O-methyl modified nucleotide
  modified_base 7: mod_base = OTHER; note = 2'-fluoro modified nucleotide
  modified_base 8: mod_base = OTHER; note = 2'-O-methyl modified nucleotide
  modified_base 9: mod_base = OTHER; note = 2'-fluoro modified nucleotide
  modified_base 10: mod_base = OTHER; note = 2'-fluoro modified nucleotide
  modified_base 11: mod_base = OTHER; note = 2'-fluoro modified nucleotide
  modified_base 12: mod_base = OTHER; note = 2'-O-methyl modified nucleotide
  modified_base 13: mod_base = OTHER; note = 2'-O-methyl modified nucleotide
  modified_base 14: mod_base = OTHER; note = 2'-O-methyl modified nucleotide
  modified_base 15: mod_base = OTHER; note = 2'-O-methyl modified nucleotide
  modified_base 16: mod_base = OTHER; note = 2'-O-methyl modified nucleotide
  modified_base 17: mod_base = OTHER; note = 2'-O-methyl modified nucleotide
  modified_base 18: mod_base = OTHER; note = 2'-O-methyl modified nucleotide
  modified_base 19: mod_base = OTHER; note = 2'-O-methyl modified nucleotide
  modified_base 20: mod_base = OTHER; note = 2'-O-methyl modified nucleotide
  modified_base 21: mod_base = OTHER; note = 2'-O-methyl modified nucleotide
aatggatgtggtggcaatggt

SEQ ID NO: 414 - RNA, 21 nt, synthetic construct
  source 1..21: mol_type = other RNA
  modified_base 1: mod_base = OTHER; note = 2'-O-methyl modified nucleotide with 3'-phosphorothioate linkage
  modified_base 2: mod_base = OTHER; note = 2'-O-methyl modified nucleotide with 3'-phosphorothioate linkage
  modified_base 3: mod_base = OTHER; note = 2'-O-methyl modified nucleotide
  modified_base 4: mod_base = OTHER; note = 2'-O-methyl modified nucleotide
  modified_base 5: mod_base = OTHER; note = 2'-O-methyl modified nucleotide
  modified_base 6: mod_base = OTHER; note = 2'-O-methyl modified nucleotide
  modified_base 7: mod_base = OTHER; note = 2'-fluoro modified nucleotide
  modified_base 8: mod_base = OTHER; note = 2'-O-methyl modified nucleotide
  modified_base 9: mod_base = OTHER; note = 2'-fluoro modified nucleotide
  modified_base 10: mod_base = OTHER; note = 2'-fluoro modified nucleotide
  modified_base 11: mod_base = OTHER; note = 2'-fluoro modified nucleotide
  modified_base 12: mod_base = OTHER; note = 2'-O-methyl modified nucleotide
  modified_base 13: mod_base = OTHER; note = 2'-O-methyl modified nucleotide
  modified_base 14: mod_base = OTHER; note = 2'-O-methyl modified nucleotide
  modified_base 15: mod_base = OTHER; note = 2'-O-methyl modified nucleotide
  modified_base 16: mod_base = OTHER; note = 2'-O-methyl modified nucleotide
  modified_base 17: mod_base = OTHER; note = 2'-O-methyl modified nucleotide
  modified_base 18: mod_base = OTHER; note = 2'-O-methyl modified nucleotide
  modified_base 19: mod_base = OTHER; note = 2'-O-methyl modified nucleotide
  modified_base 20: mod_base = OTHER; note = 2'-O-methyl modified nucleotide
  modified_base 21: mod_base = OTHER; note = 2'-O-methyl modified nucleotide
gatgtggtggcaatggtgaat

SEQ ID NO: 415 - RNA, 21 nt, synthetic construct
  source 1..21: mol_type = other RNA
  modified_base 1: mod_base = OTHER; note = 2'-O-methyl modified nucleotide with 3'-phosphorothioate linkage
  modified_base 2: mod_base = OTHER; note = 2'-O-methyl modified nucleotide with 3'-phosphorothioate linkage
  modified_base 3: mod_base = OTHER; note = 2'-O-methyl modified nucleotide
  modified_base 4: mod_base = OTHER; note = 2'-O-methyl modified nucleotide
  modified_base 5: mod_base = OTHER; note = 2'-O-methyl modified nucleotide
  modified_base 6: mod_base = OTHER; note = 2'-O-methyl modified nucleotide
  modified_base 7: mod_base = OTHER; note = 2'-fluoro modified nucleotide
  modified_base 8: mod_base = OTHER; note = 2'-O-methyl modified nucleotide
  modified_base 9: mod_base = OTHER; note = 2'-fluoro modified nucleotide
  modified_base 10: mod_base = OTHER; note = 2'-fluoro modified nucleotide
  modified_base 11: mod_base = OTHER; note = 2'-fluoro modified nucleotide
  modified_base 12: mod_base = OTHER; note = 2'-O-methyl modified nucleotide
  modified_base 13: mod_base = OTHER; note = 2'-O-methyl modified nucleotide
  modified_base 14: mod_base = OTHER; note = 2'-O-methyl modified nucleotide
  modified_base 15: mod_base = OTHER; note = 2'-O-methyl modified nucleotide
  modified_base 16: mod_base = OTHER; note = 2'-O-methyl modified nucleotide
  modified_base 17: mod_base = OTHER; note = 2'-O-methyl modified nucleotide
  modified_base 18: mod_base = OTHER; note = 2'-O-methyl modified nucleotide
  modified_base 19: mod_base = OTHER; note = 2'-O-methyl modified nucleotide
  modified_base 20: mod_base = OTHER; note = 2'-O-methyl modified nucleotide
  modified_base 21: mod_base = OTHER; note = 2'-O-methyl modified nucleotide
atgtggtggcaatggtgaatg

SEQ ID NO: 416 - RNA, 21 nt, synthetic construct
  source 1..21: mol_type = other RNA
  modified_base 1: mod_base = OTHER; note = 2'-O-methyl modified nucleotide with 3'-phosphorothioate linkage
  modified_base 2: mod_base = OTHER; note = 2'-O-methyl modified nucleotide with 3'-phosphorothioate linkage
  modified_base 3: mod_base = OTHER; note = 2'-O-methyl modified nucleotide
  modified_base 4: mod_base = OTHER; note = 2'-O-methyl modified nucleotide
  modified_base 5: mod_base = OTHER; note = 2'-O-methyl modified nucleotide
  modified_base 6: mod_base = OTHER; note = 2'-O-methyl modified nucleotide
  modified_base 7: mod_base = OTHER; note = 2'-fluoro modified nucleotide
  modified_base 8: mod_base = OTHER; note = 2'-O-methyl modified nucleotide
  modified_base 9: mod_base = OTHER; note = 2'-fluoro modified nucleotide
  modified_base 10: mod_base = OTHER; note = 2'-fluoro modified nucleotide
  modified_base 11: mod_base = OTHER; note = 2'-fluoro modified nucleotide
  modified_base 12: mod_base = OTHER; note = 2'-O-methyl modified nucleotide
  modified_base 13: mod_base = OTHER; note = 2'-O-methyl modified nucleotide
  modified_base 14: mod_base = OTHER; note = 2'-O-methyl modified nucleotide
  modified_base 15: mod_base = OTHER; note = 2'-O-methyl modified nucleotide
  modified_base 16: mod_base = OTHER; note = 2'-O-methyl modified nucleotide
  modified_base 17: mod_base = OTHER; note = 2'-O-methyl modified nucleotide
  modified_base 18: mod_base = OTHER; note = 2'-O-methyl modified nucleotide
  modified_base 19: mod_base = OTHER; note = 2'-O-methyl modified nucleotide
  modified_base 20: mod_base = OTHER; note = 2'-O-methyl modified nucleotide
  modified_base 21: mod_base = OTHER; note = 2'-O-methyl modified nucleotide
tgtggtggcaatggtgaatga

SEQ ID NO: 417 - RNA, 21 nt, synthetic construct
  source 1..21: mol_type = other RNA
  modified_base 1: mod_base = OTHER; note = 2'-O-methyl modified nucleotide with 3'-phosphorothioate linkage
  modified_base 2: mod_base = OTHER; note = 2'-O-methyl modified nucleotide with 3'-phosphorothioate linkage
  modified_base 3: mod_base = OTHER; note = 2'-O-methyl modified nucleotide
  modified_base 4: mod_base = OTHER; note = 2'-O-methyl modified nucleotide
  modified_base 5: mod_base = OTHER; note = 2'-O-methyl modified nucleotide
  modified_base 6: mod_base = OTHER; note = 2'-O-methyl modified nucleotide
  modified_base 7: mod_base = OTHER; note = 2'-fluoro modified nucleotide
  modified_base 8: mod_base = OTHER; note = 2'-O-methyl modified nucleotide
  modified_base 9: mod_base = OTHER; note = 2'-fluoro modified nucleotide
  modified_base 10: mod_base = OTHER; note = 2'-fluoro modified nucleotide
  modified_base 11: mod_base = OTHER; note = 2'-fluoro modified nucleotide
  modified_base 12: mod_base = OTHER; note = 2'-O-methyl modified nucleotide
  modified_base 13: mod_base = OTHER; note = 2'-O-methyl modified nucleotide
  modified_base 14: mod_base = OTHER; note = 2'-O-methyl modified nucleotide
  modified_base 15: mod_base = OTHER; note = 2'-O-methyl modified nucleotide
  modified_base 16: mod_base = OTHER; note = 2'-O-methyl modified nucleotide
  modified_base 17: mod_base = OTHER; note = 2'-O-methyl modified nucleotide
  modified_base 18: mod_base = OTHER; note = 2'-O-methyl modified nucleotide
  modified_base 19: mod_base = OTHER; note = 2'-O-methyl modified nucleotide
  modified_base 20: mod_base = OTHER; note = 2'-O-methyl modified nucleotide
  modified_base 21: mod_base = OTHER; note = 2'-O-methyl modified nucleotide
ggtggcaatggtgaatgacac

SEQ ID NO: 418 - RNA, 21 nt, synthetic construct
  source 1..21: mol_type = other RNA
  modified_base 1: mod_base = OTHER; note = 2'-O-methyl modified nucleotide with 3'-phosphorothioate linkage
  modified_base 2: mod_base = OTHER; note = 2'-O-methyl modified nucleotide with 3'-phosphorothioate linkage
  modified_base 3: mod_base = OTHER; note = 2'-O-methyl modified nucleotide
  modified_base 4: mod_base = OTHER; note = 2'-O-methyl modified nucleotide
  modified_base 5: mod_base = OTHER; note = 2'-O-methyl modified nucleotide
  modified_base 6: mod_base = OTHER; note = 2'-O-methyl modified nucleotide
  modified_base 7: mod_base = OTHER; note = 2'-fluoro modified nucleotide
  modified_base 8: mod_base = OTHER; note = 2'-O-methyl modified nucleotide
  modified_base 9: mod_base = OTHER; note = 2'-fluoro modified nucleotide
  modified_base 10: mod_base = OTHER; note = 2'-fluoro modified nucleotide
  modified_base 11: mod_base = OTHER; note = 2'-fluoro modified nucleotide
  modified_base 12: mod_base = OTHER; note = 2'-O-methyl modified nucleotide
  modified_base 13: mod_base = OTHER; note = 2'-O-methyl modified nucleotide
  modified_base 14: mod_base = OTHER; note = 2'-O-methyl modified nucleotide
  modified_base 15: mod_base = OTHER; note = 2'-O-methyl modified nucleotide
  modified_base 16: mod_base = OTHER; note = 2'-O-methyl modified nucleotide
  modified_base 17: mod_base = OTHER; note = 2'-O-methyl modified nucleotide
  modified_base 18: mod_base = OTHER; note = 2'-O-methyl modified nucleotide
  modified_base 19: mod_base = OTHER; note = 2'-O-methyl modified nucleotide
  modified_base 20: mod_base = OTHER; note = 2'-O-methyl modified nucleotide
  modified_base 21: mod_base = OTHER; note = 2'-O-methyl modified nucleotide
ggcaatggtgaatgacacggt

SEQ ID NO: 419 - RNA, 21 nt, synthetic construct
  source 1..21: mol_type = other RNA
  modified_base 1: mod_base = OTHER; note = 2'-O-methyl modified nucleotide with 3'-phosphorothioate linkage
  modified_base 2: mod_base = OTHER; note = 2'-O-methyl modified nucleotide with 3'-phosphorothioate linkage
  modified_base 3: mod_base = OTHER; note = 2'-O-methyl modified nucleotide
  modified_base 4: mod_base = OTHER; note = 2'-O-methyl modified nucleotide
  modified_base 5: mod_base = OTHER; note = 2'-O-methyl modified nucleotide
  modified_base 6: mod_base = OTHER; note = 2'-O-methyl modified nucleotide
  modified_base 7: mod_base = OTHER; note = 2'-fluoro modified nucleotide
  modified_base 8: mod_base = OTHER; note = 2'-O-methyl modified nucleotide
  modified_base 9: mod_base = OTHER; note = 2'-fluoro modified nucleotide
  modified_base 10: mod_base = OTHER; note = 2'-fluoro modified nucleotide
  modified_base 11: mod_base = OTHER; note = 2'-fluoro modified nucleotide
  modified_base 12: mod_base = OTHER; note = 2'-O-methyl modified nucleotide
  modified_base 13: mod_base = OTHER; note = 2'-O-methyl modified nucleotide
  modified_base 14: mod_base = OTHER; note = 2'-O-methyl modified nucleotide
  modified_base 15: mod_base = OTHER; note = 2'-O-methyl modified nucleotide
  modified_base 16: mod_base = OTHER; note = 2'-O-methyl modified nucleotide
  modified_base 17: mod_base = OTHER; note = 2'-O-methyl modified nucleotide
  modified_base 18: mod_base = OTHER; note = 2'-O-methyl modified nucleotide
  modified_base 19: mod_base = OTHER; note = 2'-O-methyl modified nucleotide
  modified_base 20: mod_base = OTHER; note = 2'-O-methyl modified nucleotide
  modified_base 21: mod_base = OTHER; note = 2'-O-methyl modified nucleotide
gcaatggtgaatgacacggtg

SEQ ID NO: 420 - RNA, 21 nt, synthetic construct
  source 1..21: mol_type = other RNA
  modified_base 1: mod_base = OTHER; note = 2'-O-methyl modified nucleotide with 3'-phosphorothioate linkage
  modified_base 2: mod_base = OTHER; note = 2'-O-methyl modified nucleotide with 3'-phosphorothioate linkage
  modified_base 3: mod_base = OTHER; note = 2'-O-methyl modified nucleotide
  modified_base 4: mod_base = OTHER; note = 2'-O-methyl modified nucleotide
  modified_base 5: mod_base = OTHER; note = 2'-O-methyl modified nucleotide
  modified_base 6: mod_base = OTHER; note = 2'-O-methyl modified nucleotide
  modified_base 7: mod_base = OTHER; note = 2'-fluoro modified nucleotide
  modified_base 8: mod_base = OTHER; note = 2'-O-methyl modified nucleotide
  modified_base 9: mod_base = OTHER; note = 2'-fluoro modified nucleotide
  modified_base 10: mod_base = OTHER; note = 2'-fluoro modified nucleotide
  modified_base 11: mod_base = OTHER; note = 2'-fluoro modified nucleotide
  modified_base 12: mod_base = OTHER; note = 2'-O-methyl modified nucleotide
  modified_base 13: mod_base = OTHER; note = 2'-O-methyl modified nucleotide
  modified_base 14: mod_base = OTHER; note = 2'-O-methyl modified nucleotide
  modified_base 15: mod_base = OTHER; note = 2'-O-methyl modified nucleotide
  modified_base 16: mod_base = OTHER; note = 2'-O-methyl modified nucleotide
  modified_base 17: mod_base = OTHER; note = 2'-O-methyl modified nucleotide
  modified_base 18: mod_base = OTHER; note = 2'-O-methyl modified nucleotide
  modified_base 19: mod_base = OTHER; note = 2'-O-methyl modified nucleotide
  modified_base 20: mod_base = OTHER; note = 2'-O-methyl modified nucleotide
  modified_base 21: mod_base = OTHER; note = 2'-O-methyl modified nucleotide
atggtgaatgacacggtggcc

SEQ ID NO: 421 - RNA, 21 nt, synthetic construct
  source 1..21: mol_type = other RNA
  modified_base 1: mod_base = OTHER; note = 2'-O-methyl modified nucleotide with 3'-phosphorothioate linkage
  modified_base 2: mod_base = OTHER; note = 2'-O-methyl modified nucleotide with 3'-phosphorothioate linkage
  modified_base 3: mod_base = OTHER; note = 2'-O-methyl modified nucleotide
  modified_base 4: mod_base = OTHER; note = 2'-O-methyl modified nucleotide
  modified_base 5: mod_base = OTHER; note = 2'-O-methyl modified nucleotide
  modified_base 6: mod_base = OTHER; note = 2'-O-methyl modified nucleotide
  modified_base 7: mod_base = OTHER; note = 2'-fluoro modified nucleotide
  modified_base 8: mod_base = OTHER; note = 2'-O-methyl modified nucleotide
  modified_base 9: mod_base = OTHER; note = 2'-fluoro modified nucleotide
  modified_base 10: mod_base = OTHER; note = 2'-fluoro modified nucleotide
  modified_base 11: mod_base = OTHER; note = 2'-fluoro modified nucleotide
  modified_base 12: mod_base = OTHER; note = 2'-O-methyl modified nucleotide
  modified_base 13: mod_base = OTHER; note = 2'-O-methyl modified nucleotide
  modified_base 14: mod_base = OTHER; note = 2'-O-methyl modified nucleotide
  modified_base 15: mod_base = OTHER; note = 2'-O-methyl modified nucleotide
  modified_base 16: mod_base = OTHER; note = 2'-O-methyl modified nucleotide
  modified_base 17: mod_base = OTHER; note = 2'-O-methyl modified nucleotide
  modified_base 18: mod_base = OTHER; note = 2'-O-methyl modified nucleotide
  modified_base 19: mod_base = OTHER; note = 2'-O-methyl modified nucleotide
  modified_base 20: mod_base = OTHER; note = 2'-O-methyl modified nucleotide
  modified_base 21: mod_base = OTHER; note = 2'-O-methyl modified nucleotide
tggtgaatgacacggtggcca

SEQ ID NO: 422 - RNA, 21 nt, synthetic construct
  source 1..21: mol_type = other RNA
  modified_base 1: mod_base = OTHER; note = 2'-O-methyl modified nucleotide with 3'-phosphorothioate linkage
  modified_base 2: mod_base = OTHER; note = 2'-O-methyl modified nucleotide with 3'-phosphorothioate linkage
  modified_base 3: mod_base = OTHER; note = 2'-O-methyl modified nucleotide
  modified_base 4: mod_base = OTHER; note = 2'-O-methyl modified nucleotide
  modified_base 5: mod_base = OTHER; note = 2'-O-methyl modified nucleotide
  modified_base 6: mod_base = OTHER; note = 2'-O-methyl modified nucleotide
  modified_base 7: mod_base = OTHER; note = 2'-fluoro modified nucleotide
  modified_base 8: mod_base = OTHER; note = 2'-O-methyl modified nucleotide
  modified_base 9: mod_base = OTHER; note = 2'-fluoro modified nucleotide
  modified_base 10: mod_base = OTHER; note = 2'-fluoro modified nucleotide
  modified_base 11: mod_base = OTHER; note = 2'-fluoro modified nucleotide
  modified_base 12: mod_base = OTHER; note = 2'-O-methyl modified nucleotide
  modified_base 13: mod_base = OTHER; note = 2'-O-methyl modified nucleotide
  modified_base 14: mod_base = OTHER; note = 2'-O-methyl modified nucleotide
  modified_base 15: mod_base = OTHER; note = 2'-O-methyl modified nucleotide
  modified_base 16: mod_base = OTHER; note = 2'-O-methyl modified nucleotide
  modified_base 17: mod_base = OTHER; note = 2'-O-methyl modified nucleotide
  modified_base 18: mod_base = OTHER; note = 2'-O-methyl modified nucleotide
  modified_base 19: mod_base = OTHER; note = 2'-O-methyl modified nucleotide
  modified_base 20: mod_base = OTHER; note = 2'-O-methyl modified nucleotide
  modified_base 21: mod_base = OTHER; note = 2'-O-methyl modified nucleotide
ccacgatgatctcctgctact

SEQ ID NO: 423 - RNA, 21 nt, synthetic construct
  source 1..21: mol_type = other RNA
  modified_base 1: mod_base = OTHER; note = 2'-O-methyl modified nucleotide with 3'-phosphorothioate linkage
  modified_base 2: mod_base = OTHER; note = 2'-O-methyl modified nucleotide with 3'-phosphorothioate linkage
  modified_base 3: mod_base = OTHER; note = 2'-O-methyl modified nucleotide
  modified_base 4: mod_base = OTHER; note = 2'-O-methyl modified nucleotide
  modified_base 5: mod_base = OTHER; note = 2'-O-methyl modified nucleotide
  modified_base 6: mod_base = OTHER; note = 2'-O-methyl modified nucleotide
  modified_base 7: mod_base = OTHER; note = 2'-fluoro modified nucleotide
  modified_base 8: mod_base = OTHER; note = 2'-O-methyl modified nucleotide
  modified_base 9: mod_base = OTHER; note = 2'-fluoro modified nucleotide
  modified_base 10: mod_base = OTHER; note = 2'-fluoro modified nucleotide
  modified_base 11: mod_base = OTHER; note = 2'-fluoro modified nucleotide
  modified_base 12: mod_base = OTHER; note = 2'-O-methyl modified nucleotide
  modified_base 13: mod_base = OTHER; note = 2'-O-methyl modified nucleotide
  modified_base 14: mod_base = OTHER; note = 2'-O-methyl modified nucleotide
  modified_base 15: mod_base = OTHER; note = 2'-O-methyl modified nucleotide
  modified_base 16: mod_base = OTHER; note = 2'-O-methyl modified nucleotide
  modified_base 17: mod_base = OTHER; note = 2'-O-methyl modified nucleotide
  modified_base 18: mod_base = OTHER; note = 2'-O-methyl modified nucleotide
  modified_base 19: mod_base = OTHER; note = 2'-O-methyl modified nucleotide
  modified_base 20: mod_base = OTHER; note = 2'-O-methyl modified nucleotide
  modified_base 21: mod_base = OTHER; note = 2'-O-methyl modified nucleotide
cacgatgatctcctgctacta

SEQ ID NO: 424 - RNA, 21 nt, synthetic construct
  source 1..21: mol_type = other RNA
  modified_base 1: mod_base = OTHER; note = 2'-O-methyl modified nucleotide with 3'-phosphorothioate linkage
  modified_base 2: mod_base = OTHER; note = 2'-O-methyl modified nucleotide with 3'-phosphorothioate linkage
  modified_base 3: mod_base = OTHER; note = 2'-O-methyl modified nucleotide
  modified_base 4: mod_base = OTHER; note = 2'-O-methyl modified nucleotide
  modified_base 5: mod_base = OTHER; note = 2'-O-methyl modified nucleotide
  modified_base 6: mod_base = OTHER; note = 2'-O-methyl modified nucleotide
  modified_base 7: mod_base = OTHER; note = 2'-fluoro modified nucleotide
  modified_base 8: mod_base = OTHER; note = 2'-O-methyl modified nucleotide
  modified_base 9: mod_base = OTHER; note = 2'-fluoro modified nucleotide
  modified_base 10: mod_base = OTHER; note = 2'-fluoro modified nucleotide
  modified_base 11: mod_base = OTHER; note = 2'-fluoro modified nucleotide
  modified_base 12: mod_base = OTHER; note = 2'-O-methyl modified nucleotide
  modified_base 13: mod_base = OTHER; note = 2'-O-methyl modified nucleotide
  modified_base 14: mod_base = OTHER; note = 2'-O-methyl modified nucleotide
  modified_base 15: mod_base = OTHER; note = 2'-O-methyl modified nucleotide
  modified_base 16: mod_base = OTHER; note = 2'-O-methyl modified nucleotide
  modified_base 17: mod_base = OTHER; note = 2'-O-methyl modified nucleotide
  modified_base 18: mod_base = OTHER; note = 2'-O-methyl modified nucleotide
  modified_base 19: mod_base = OTHER; note = 2'-O-methyl modified nucleotide
  modified_base 20: mod_base = OTHER; note = 2'-O-methyl modified nucleotide
  modified_base 21: mod_base = OTHER; note = 2'-O-methyl modified nucleotide
acgatgatctcctgctactac

SEQ ID NO: 425 - RNA, 21 nt, synthetic construct
  source 1..21: mol_type = other RNA
  modified_base 1: mod_base = OTHER; note = 2'-O-methyl modified nucleotide with 3'-phosphorothioate linkage
  modified_base 2: mod_base = OTHER; note = 2'-O-methyl modified nucleotide with 3'-phosphorothioate linkage
  modified_base 3: mod_base = OTHER; note = 2'-O-methyl modified nucleotide
  modified_base 4: mod_base = OTHER; note = 2'-O-methyl modified nucleotide
  modified_base 5: mod_base = OTHER; note = 2'-O-methyl modified nucleotide
  modified_base 6: mod_base = OTHER; note = 2'-O-methyl modified nucleotide
  modified_base 7: mod_base = OTHER; note = 2'-fluoro modified nucleotide
  modified_base 8: mod_base = OTHER; note = 2'-O-methyl modified nucleotide
  modified_base 9: mod_base = OTHER; note = 2'-fluoro modified nucleotide
  modified_base 10: mod_base = OTHER; note = 2'-fluoro modified nucleotide
  modified_base 11: mod_base = OTHER; note = 2'-fluoro modified nucleotide
  modified_base 12: mod_base = OTHER; note = 2'-O-methyl modified nucleotide
  modified_base 13: mod_base = OTHER; note = 2'-O-methyl modified nucleotide
  modified_base 14: mod_base = OTHER; note = 2'-O-methyl modified nucleotide
  modified_base 15: mod_base = OTHER; note = 2'-O-methyl modified nucleotide
  modified_base 16: mod_base = OTHER; note = 2'-O-methyl modified nucleotide
  modified_base 17: mod_base = OTHER; note = 2'-O-methyl modified nucleotide
  modified_base 18: mod_base = OTHER; note = 2'-O-methyl modified nucleotide
  modified_base 19: mod_base = OTHER; note = 2'-O-methyl modified nucleotide
  modified_base 20: mod_base = OTHER; note = 2'-O-methyl modified nucleotide
  modified_base 21: mod_base = OTHER; note = 2'-O-methyl modified nucleotide
cgatgatctcctgctactacg

SEQ ID NO: 426 - RNA, 21 nt, synthetic construct
  source 1..21: mol_type = other RNA
  modified_base 1: mod_base = OTHER; note = 2'-O-methyl modified nucleotide with 3'-phosphorothioate linkage
  modified_base 2: mod_base = OTHER; note = 2'-O-methyl modified nucleotide with 3'-phosphorothioate linkage
  modified_base 3: mod_base = OTHER; note = 2'-O-methyl modified nucleotide
  modified_base 4: mod_base = OTHER; note = 2'-O-methyl modified nucleotide
  modified_base 5: mod_base = OTHER; note = 2'-O-methyl modified nucleotide
  modified_base 6: mod_base = OTHER; note = 2'-O-methyl modified nucleotide
  modified_base 7: mod_base = OTHER; note = 2'-fluoro modified nucleotide
  modified_base 8: mod_base = OTHER; note = 2'-O-methyl modified nucleotide
  modified_base 9: mod_base = OTHER; note = 2'-fluoro modified nucleotide
  modified_base 10: mod_base = OTHER; note = 2'-fluoro modified nucleotide
  modified_base 11: mod_base = OTHER; note = 2'-fluoro modified nucleotide
  modified_base 12: mod_base = OTHER; note = 2'-O-methyl modified nucleotide
  modified_base 13: mod_base = OTHER; note = 2'-O-methyl modified nucleotide
  modified_base 14: mod_base = OTHER; note = 2'-O-methyl modified nucleotide
  modified_base 15: mod_base = OTHER; note = 2'-O-methyl modified nucleotide
  modified_base 16: mod_base = OTHER; note = 2'-O-methyl modified nucleotide
  modified_base 17: mod_base = OTHER; note = 2'-O-methyl modified nucleotide
  modified_base 18: mod_base = OTHER; note = 2'-O-methyl modified nucleotide
  modified_base 19: mod_base = OTHER; note = 2'-O-methyl modified nucleotide
  modified_base 20: mod_base = OTHER; note = 2'-O-methyl modified nucleotide
  modified_base 21: mod_base = OTHER; note = 2'-O-methyl modified nucleotide
gatgatctcctgctactacga

SEQ ID NO: 427 - RNA, 21 nt, synthetic construct
  source 1..21: mol_type = other RNA
  modified_base 1: mod_base = OTHER; note = 2'-O-methyl modified nucleotide with 3'-phosphorothioate linkage
  modified_base 2: mod_base = OTHER; note = 2'-O-methyl modified nucleotide with 3'-phosphorothioate linkage
  modified_base 3: mod_base = OTHER; note = 2'-O-methyl modified nucleotide
  modified_base 4: mod_base = OTHER; note = 2'-O-methyl modified nucleotide
  modified_base 5: mod_base = OTHER; note = 2'-O-methyl modified nucleotide
  modified_base 6: mod_base = OTHER; note = 2'-O-methyl modified nucleotide
  modified_base 7: mod_base = OTHER; note = 2'-fluoro modified nucleotide
  modified_base 8: mod_base = OTHER; note = 2'-O-methyl modified nucleotide
  modified_base 9: mod_base = OTHER; note = 2'-fluoro modified nucleotide
  modified_base 10: mod_base = OTHER; note = 2'-fluoro modified nucleotide
  modified_base 11: mod_base = OTHER; note = 2'-fluoro modified nucleotide
  modified_base 12: mod_base = OTHER; note = 2'-O-methyl modified nucleotide
  modified_base 13: mod_base = OTHER; note = 2'-O-methyl modified nucleotide
  modified_base 14: mod_base = OTHER; note = 2'-O-methyl modified nucleotide
  modified_base 15: mod_base = OTHER; note = 2'-O-methyl modified nucleotide
  modified_base 16: mod_base = OTHER; note = 2'-O-methyl modified nucleotide
  modified_base 17: mod_base = OTHER; note = 2'-O-methyl modified nucleotide
  modified_base 18: mod_base = OTHER; note = 2'-O-methyl modified nucleotide
  modified_base 19: mod_base = OTHER; note = 2'-O-methyl modified nucleotide
  modified_base 20: mod_base = OTHER; note = 2'-O-methyl modified nucleotide
  modified_base 21: mod_base = OTHER; note = 2'-O-methyl modified nucleotide
tgatctcctgctactacgaag

SEQ ID NO: 428 - RNA, 21 nt, synthetic construct
  source 1..21: mol_type = other RNA
  modified_base 1: mod_base = OTHER; note = 2'-O-methyl modified nucleotide with 3'-phosphorothioate linkage
  modified_base 2: mod_base = OTHER; note = 2'-O-methyl modified nucleotide with 3'-phosphorothioate linkage
  modified_base 3: mod_base = OTHER; note = 2'-O-methyl modified nucleotide
  modified_base 4: mod_base = OTHER; note = 2'-O-methyl modified nucleotide
  modified_base 5: mod_base = OTHER; note = 2'-O-methyl modified nucleotide
  modified_base 6: mod_base = OTHER; note = 2'-O-methyl modified nucleotide
  modified_base 7: mod_base = OTHER; note = 2'-fluoro modified nucleotide
  modified_base 8: mod_base = OTHER; note = 2'-O-methyl modified nucleotide
  modified_base 9: mod_base = OTHER; note = 2'-fluoro modified nucleotide
  modified_base 10: mod_base = OTHER; note = 2'-fluoro modified nucleotide
  modified_base 11: mod_base = OTHER; note = 2'-fluoro modified nucleotide
  modified_base 12: mod_base = OTHER; note = 2'-O-methyl modified nucleotide
  modified_base 13: mod_base = OTHER; note = 2'-O-methyl modified nucleotide
  modified_base 14: mod_base = OTHER; note = 2'-O-methyl modified nucleotide
  modified_base 15: mod_base = OTHER; note = 2'-O-methyl modified nucleotide
  modified_base 16: mod_base = OTHER; note = 2'-O-methyl modified nucleotide
  modified_base 17: mod_base = OTHER; note = 2'-O-methyl modified nucleotide
  modified_base 18: mod_base = OTHER; note = 2'-O-methyl modified nucleotide
  modified_base 19: mod_base = OTHER; note = 2'-O-methyl modified nucleotide
  modified_base 20: mod_base = OTHER; note = 2'-O-methyl modified nucleotide
  modified_base 21: mod_base = OTHER; note = 2'-O-methyl modified nucleotide
gatctcctgctactacgaaga

SEQ ID NO: 429 - RNA, 21 nt, synthetic construct
  source 1..21: mol_type = other RNA
  modified_base 1: mod_base = OTHER; note = 2'-O-methyl modified nucleotide with 3'-phosphorothioate linkage
  modified_base 2: mod_base = OTHER; note = 2'-O-methyl modified nucleotide with 3'-phosphorothioate linkage
  modified_base 3: mod_base = OTHER; note = 2'-O-methyl modified nucleotide
  modified_base 4: mod_base = OTHER; note = 2'-O-methyl modified nucleotide
  modified_base 5: mod_base = OTHER; note = 2'-O-methyl modified nucleotide
  modified_base 6: mod_base = OTHER; note = 2'-O-methyl modified nucleotide
  modified_base 7: mod_base = OTHER; note = 2'-fluoro modified nucleotide
  modified_base 8: mod_base = OTHER; note = 2'-O-methyl modified nucleotide
  modified_base 9: mod_base = OTHER; note = 2'-fluoro modified nucleotide
  modified_base 10: mod_base = OTHER; note = 2'-fluoro modified nucleotide
  modified_base 11: mod_base = OTHER; note = 2'-fluoro modified nucleotide
  modified_base 12: mod_base = OTHER; note = 2'-O-methyl modified nucleotide
  modified_base 13: mod_base = OTHER; note = 2'-O-methyl modified nucleotide
  modified_base 14: mod_base = OTHER; note = 2'-O-methyl modified nucleotide
  modified_base 15: mod_base = OTHER; note = 2'-O-methyl modified nucleotide
  modified_base 16: mod_base = OTHER; note = 2'-O-methyl modified nucleotide
  modified_base 17: mod_base = OTHER; note = 2'-O-methyl modified nucleotide
  modified_base 18: mod_base = OTHER; note = 2'-O-methyl modified nucleotide
  modified_base 19: mod_base = OTHER; note = 2'-O-methyl modified nucleotide
  modified_base 20: mod_base = OTHER; note = 2'-O-methyl modified nucleotide
  modified_base 21: mod_base = OTHER; note = 2'-O-methyl modified nucleotide
ctactacgaagaccatcagtg

SEQ ID NO: 430 - RNA, 21 nt, synthetic construct
  source 1..21: mol_type = other RNA
  modified_base 1: mod_base = OTHER; note = 2'-O-methyl modified nucleotide with 3'-phosphorothioate linkage
  modified_base 2: mod_base = OTHER; note = 2'-O-methyl modified nucleotide with 3'-phosphorothioate linkage
  modified_base 3: mod_base = OTHER; note = 2'-O-methyl modified nucleotide
  modified_base 4: mod_base = OTHER; note = 2'-O-methyl modified nucleotide
  modified_base 5: mod_base = OTHER; note = 2'-O-methyl modified nucleotide
  modified_base 6: mod_base = OTHER; note = 2'-O-methyl modified nucleotide
  modified_base 7: mod_base = OTHER; note = 2'-fluoro modified nucleotide
  modified_base 8: mod_base = OTHER; note = 2'-O-methyl modified nucleotide
  modified_base 9: mod_base = OTHER; note = 2'-fluoro modified nucleotide
  modified_base 10: mod_base = OTHER; note = 2'-fluoro modified nucleotide
  modified_base 11: mod_base = OTHER; note = 2'-fluoro modified nucleotide
  modified_base 12: mod_base = OTHER; note = 2'-O-methyl modified nucleotide
  modified_base 13: mod_base = OTHER; note = 2'-O-methyl modified nucleotide
  modified_base 14: mod_base = OTHER; note = 2'-O-methyl modified nucleotide
  modified_base 15: mod_base = OTHER; note = 2'-O-methyl modified nucleotide
  modified_base 16: mod_base = OTHER; note = 2'-O-methyl modified nucleotide
  modified_base 17: mod_base = OTHER; note = 2'-O-methyl modified nucleotide
  modified_base 18: mod_base = OTHER; note = 2'-O-methyl modified nucleotide
  modified_base 19: mod_base = OTHER; note = 2'-O-methyl modified nucleotide
  modified_base 20: mod_base = OTHER; note = 2'-O-methyl modified nucleotide
  modified_base 21: mod_base = OTHER; note = 2'-O-methyl modified nucleotide
tactacgaagaccatcagtgc

SEQ ID NO: 431 - RNA, 21 nt, synthetic construct
  source 1..21: mol_type = other RNA
  modified_base 1: mod_base = OTHER; note = 2'-O-methyl modified nucleotide with 3'-phosphorothioate linkage
  modified_base 2: mod_base = OTHER; note = 2'-O-methyl modified nucleotide with 3'-phosphorothioate linkage
  modified_base 3: mod_base = OTHER; note = 2'-O-methyl modified nucleotide
  modified_base 4: mod_base = OTHER; note = 2'-O-methyl modified nucleotide
  modified_base 5: mod_base = OTHER; note = 2'-O-methyl modified nucleotide
  modified_base 6: mod_base = OTHER; note = 2'-O-methyl modified nucleotide
  modified_base 7: mod_base = OTHER; note = 2'-fluoro modified nucleotide
  modified_base 8: mod_base = OTHER; note = 2'-O-methyl modified nucleotide
  modified_base 9: mod_base = OTHER; note = 2'-fluoro modified nucleotide
  modified_base 10: mod_base = OTHER; note = 2'-fluoro modified nucleotide
  modified_base 11: mod_base = OTHER; note = 2'-fluoro modified nucleotide
  modified_base 12: mod_base = OTHER; note = 2'-O-methyl modified nucleotide
  modified_base 13: mod_base = OTHER; note = 2'-O-methyl modified nucleotide
  modified_base 14: mod_base = OTHER; note = 2'-O-methyl modified nucleotide
  modified_base 15: mod_base = OTHER; note = 2'-O-methyl modified nucleotide
  modified_base 16: mod_base = OTHER; note = 2'-O-methyl modified nucleotide
  modified_base 17: mod_base = OTHER; note = 2'-O-methyl modified nucleotide
  modified_base 18: mod_base = OTHER; note = 2'-O-methyl modified nucleotide
  modified_base 19: mod_base = OTHER; note = 2'-O-methyl modified nucleotide
  modified_base 20: mod_base = OTHER; note = 2'-O-methyl modified nucleotide
  modified_base 21: mod_base = OTHER; note = 2'-O-methyl modified nucleotide
tacgaagaccatcagtgcgag

SEQ ID NO: 432 - RNA, 21 nt, synthetic construct
  source 1..21: mol_type = other RNA
  modified_base 1: mod_base = OTHER; note = 2'-O-methyl modified nucleotide with 3'-phosphorothioate linkage
  modified_base 2: mod_base = OTHER; note = 2'-O-methyl modified nucleotide with 3'-phosphorothioate linkage
  modified_base 3: mod_base = OTHER; note = 2'-O-methyl modified nucleotide
  modified_base 4: mod_base = OTHER; note = 2'-O-methyl modified nucleotide
  modified_base 5: mod_base = OTHER; note = 2'-O-methyl modified nucleotide
  modified_base 6: mod_base = OTHER; note = 2'-O-methyl modified nucleotide
  modified_base 7: mod_base = OTHER; note = 2'-fluoro modified nucleotide
  modified_base 8: mod_base = OTHER; note = 2'-O-methyl modified nucleotide
  modified_base 9: mod_base = OTHER; note = 2'-fluoro modified nucleotide
  modified_base 10: mod_base = OTHER; note = 2'-fluoro modified nucleotide
  modified_base 11: mod_base = OTHER; note = 2'-fluoro modified nucleotide
  modified_base 12: mod_base = OTHER; note = 2'-O-methyl modified nucleotide
  modified_base 13: mod_base = OTHER; note = 2'-O-methyl modified nucleotide
  modified_base 14: mod_base = OTHER; note = 2'-O-methyl modified nucleotide
  modified_base 15: mod_base = OTHER; note = 2'-O-methyl modified nucleotide
  modified_base 16: mod_base = OTHER; note = 2'-O-methyl modified nucleotide
  modified_base 17: mod_base = OTHER; note = 2'-O-methyl modified nucleotide
  modified_base 18: mod_base = OTHER; note = 2'-O-methyl modified nucleotide
  modified_base 19: mod_base = OTHER; note = 2'-O-methyl modified nucleotide
  modified_base 20: mod_base = OTHER; note = 2'-O-methyl modified nucleotide
  modified_base 21: mod_base = OTHER; note = 2'-O-methyl modified nucleotide
gaagaccatcagtgcgaggtc

SEQ ID NO: 433 - RNA, 21 nt, synthetic construct
  source 1..21: mol_type = other RNA
  modified_base 1: mod_base = OTHER; note = 2'-O-methyl modified nucleotide with 3'-phosphorothioate linkage
  modified_base 2: mod_base = OTHER; note = 2'-O-methyl modified nucleotide with 3'-phosphorothioate linkage
  modified_base 3: mod_base = OTHER; note = 2'-O-methyl modified nucleotide
  modified_base 4: mod_base = OTHER; note = 2'-O-methyl modified nucleotide
  modified_base 5: mod_base = OTHER; note = 2'-O-methyl modified nucleotide
  modified_base 6: mod_base = OTHER; note = 2'-O-methyl modified nucleotide
  modified_base 7: mod_base = OTHER; note = 2'-fluoro modified nucleotide
  modified_base 8: mod_base = OTHER; note = 2'-O-methyl modified nucleotide
  modified_base 9: mod_base = OTHER; note = 2'-fluoro modified nucleotide
  modified_base 10: mod_base = OTHER; note = 2'-fluoro modified nucleotide
  modified_base 11: mod_base = OTHER; note = 2'-fluoro modified nucleotide
  modified_base 12: mod_base = OTHER; note = 2'-O-methyl modified nucleotide
  modified_base 13: mod_base = OTHER; note = 2'-O-methyl modified nucleotide
  modified_base 14: mod_base = OTHER; note = 2'-O-methyl modified nucleotide
  modified_base 15: mod_base = OTHER; note = 2'-O-methyl modified nucleotide
  modified_base 16: mod_base = OTHER; note = 2'-O-methyl modified nucleotide
  modified_base 17: mod_base = OTHER; note = 2'-O-methyl modified nucleotide
  modified_base 18: mod_base = OTHER; note = 2'-O-methyl modified nucleotide
  modified_base 19: mod_base = OTHER; note = 2'-O-methyl modified nucleotide
  modified_base 20: mod_base = OTHER; note = 2'-O-methyl modified nucleotide
  modified_base 21: mod_base = OTHER; note = 2'-O-methyl modified nucleotide
agaccatcagtgcgaggtcgg

SEQ ID NO: 434 - RNA, 21 nt, synthetic construct
  source 1..21: mol_type = other RNA
  modified_base 1: mod_base = OTHER; note = 2'-O-methyl modified nucleotide with 3'-phosphorothioate linkage
  modified_base 2: mod_base = OTHER; note = 2'-O-methyl modified nucleotide with 3'-phosphorothioate linkage
  modified_base 3: mod_base = OTHER; note = 2'-O-methyl modified nucleotide
  modified_base 4: mod_base = OTHER; note = 2'-O-methyl modified nucleotide
  modified_base 5: mod_base = OTHER; note = 2'-O-methyl modified nucleotide
  modified_base 6: mod_base = OTHER; note = 2'-O-methyl modified nucleotide
  modified_base 7: mod_base = OTHER; note = 2'-fluoro modified nucleotide
  modified_base 8: mod_base = OTHER; note = 2'-O-methyl modified nucleotide
  modified_base 9: mod_base = OTHER; note = 2'-fluoro modified nucleotide
  modified_base 10: mod_base = OTHER; note = 2'-fluoro modified nucleotide
  modified_base 11: mod_base = OTHER; note = 2'-fluoro modified nucleotide
  modified_base 12: mod_base = OTHER; note = 2'-O-methyl modified nucleotide
  modified_base 13: mod_base = OTHER; note = 2'-O-methyl modified nucleotide
  modified_base 14: mod_base = OTHER; note = 2'-O-methyl modified nucleotide
  modified_base 15: mod_base = OTHER; note = 2'-O-methyl modified nucleotide
  modified_base 16: mod_base = OTHER; note = 2'-O-methyl modified nucleotide
  modified_base 17: mod_base = OTHER; note = 2'-O-methyl modified nucleotide
  modified_base 18: mod_base = OTHER; note = 2'-O-methyl modified nucleotide
  modified_base 19: mod_base = OTHER; note = 2'-O-methyl modified nucleotide
  modified_base 20: mod_base = OTHER; note = 2'-O-methyl modified nucleotide
  modified_base 21: mod_base = OTHER; note = 2'-O-methyl modified nucleotide
accatcagtgcgaggtcggca

SEQ ID NO: 435 - RNA, 21 nt, synthetic construct
  source 1..21: mol_type = other RNA
  modified_base 1: mod_base = OTHER; note = 2'-O-methyl modified nucleotide with 3'-phosphorothioate linkage
  modified_base 2: mod_base = OTHER; note = 2'-O-methyl modified nucleotide with 3'-phosphorothioate linkage
  modified_base 3: mod_base = OTHER; note = 2'-O-methyl modified nucleotide
  modified_base 4: mod_base = OTHER; note = 2'-O-methyl modified nucleotide
  modified_base 5: mod_base = OTHER; note = 2'-O-methyl modified nucleotide
  modified_base 6: mod_base = OTHER; note = 2'-O-methyl modified nucleotide
  modified_base 7: mod_base = OTHER; note = 2'-fluoro modified nucleotide
  modified_base 8: mod_base = OTHER; note = 2'-O-methyl modified nucleotide
  modified_base 9: mod_base = OTHER; note = 2'-fluoro modified nucleotide
  modified_base 10: mod_base = OTHER; note = 2'-fluoro modified nucleotide
  modified_base 11: mod_base = OTHER; note = 2'-fluoro modified nucleotide
  modified_base 12: mod_base = OTHER; note = 2'-O-methyl modified nucleotide
  modified_base 13: mod_base = OTHER; note = 2'-O-methyl modified nucleotide
  modified_base 14: mod_base = OTHER; note = 2'-O-methyl modified nucleotide
  modified_base 15: mod_base = OTHER; note = 2'-O-methyl modified nucleotide
  modified_base 16: mod_base = OTHER; note = 2'-O-methyl modified nucleotide
  modified_base 17: mod_base = OTHER; note = 2'-O-methyl modified nucleotide
  modified_base 18: mod_base = OTHER; note = 2'-O-methyl modified nucleotide
  modified_base 19: mod_base = OTHER; note = 2'-O-methyl modified nucleotide
  modified_base 20: mod_base = OTHER; note = 2'-O-methyl modified nucleotide
  modified_base 21: mod_base = OTHER; note = 2'-O-methyl modified nucleotide
catcagtgcgaggtcggcatg

SEQ ID NO: 436 - RNA, 21 nt, synthetic construct
  source 1..21: mol_type = other RNA
  modified_base 1: mod_base = OTHER; note = 2'-O-methyl modified nucleotide with 3'-phosphorothioate linkage
  modified_base 2: mod_base = OTHER; note = 2'-O-methyl modified nucleotide with 3'-phosphorothioate linkage
  modified_base 3: mod_base = OTHER; note = 2'-O-methyl modified nucleotide
  modified_base 4: mod_base = OTHER; note = 2'-O-methyl modified nucleotide
  modified_base 5: mod_base = OTHER; note = 2'-O-methyl modified nucleotide
  modified_base 6: mod_base = OTHER; note = 2'-O-methyl modified nucleotide
  modified_base 7: mod_base = OTHER; note = 2'-fluoro modified nucleotide
  modified_base 8: mod_base = OTHER; note = 2'-O-methyl modified nucleotide
  modified_base 9: mod_base = OTHER; note = 2'-fluoro modified nucleotide
  modified_base 10: mod_base = OTHER; note = 2'-fluoro modified nucleotide
  modified_base 11: mod_base = OTHER; note = 2'-fluoro modified nucleotide
  modified_base 12: mod_base = OTHER; note = 2'-O-methyl modified nucleotide
  modified_base 13: mod_base = OTHER; note = 2'-O-methyl modified nucleotide
  modified_base 14: mod_base = OTHER; note = 2'-O-methyl modified nucleotide
  modified_base 15: mod_base = OTHER; note = 2'-O-methyl modified nucleotide
  modified_base 16: mod_base = OTHER; note = 2'-O-methyl modified nucleotide
  modified_base 17: mod_base = OTHER; note = 2'-O-methyl modified nucleotide
  modified_base 18: mod_base = OTHER; note = 2'-O-methyl modified nucleotide
  modified_base 19: mod_base = OTHER; note = 2'-O-methyl modified nucleotide
  modified_base 20: mod_base = OTHER; note = 2'-O-methyl modified nucleotide
  modified_base 21: mod_base = OTHER; note = 2'-O-methyl modified nucleotide
tcagtgcgaggtcggcatgat

SEQ ID NO: 437 - RNA, 21 nt, synthetic construct
  source 1..21: mol_type = other RNA
  modified_base 1: mod_base = OTHER; note = 2'-O-methyl modified nucleotide with 3'-phosphorothioate linkage
  modified_base 2: mod_base = OTHER; note = 2'-O-methyl modified nucleotide with 3'-phosphorothioate linkage
  modified_base 3: mod_base = OTHER; note = 2'-O-methyl modified nucleotide
  modified_base 4: mod_base = OTHER; note = 2'-O-methyl modified nucleotide
  modified_base 5: mod_base = OTHER; note = 2'-O-methyl modified nucleotide
  modified_base 6: mod_base = OTHER; note = 2'-O-methyl modified nucleotide
  modified_base 7: mod_base = OTHER; note = 2'-fluoro modified nucleotide
  modified_base 8: mod_base = OTHER; note = 2'-O-methyl modified nucleotide
  modified_base 9: mod_base = OTHER; note = 2'-fluoro modified nucleotide
  modified_base 10: mod_base = OTHER; note = 2'-fluoro modified nucleotide
  modified_base 11: mod_base = OTHER; note = 2'-fluoro modified nucleotide
  modified_base 12: mod_base = OTHER; note = 2'-O-methyl modified nucleotide
  modified_base 13: mod_base = OTHER; note = 2'-O-methyl modified nucleotide
  modified_base 14: mod_base = OTHER; note = 2'-O-methyl modified nucleotide
  modified_base 15: mod_base = OTHER; note = 2'-O-methyl modified nucleotide
  modified_base 16: mod_base = OTHER; note = 2'-O-methyl modified nucleotide
  modified_base 17: mod_base = OTHER; note = 2'-O-methyl modified nucleotide
  modified_base 18: mod_base = OTHER; note = 2'-O-methyl modified nucleotide
  modified_base 19: mod_base = OTHER; note = 2'-O-methyl modified nucleotide
  modified_base 20: mod_base = OTHER; note = 2'-O-methyl modified nucleotide
  modified_base 21: mod_base = OTHER; note = 2'-O-methyl modified nucleotide
tggaggagatgcagaatgtgg

SEQ ID NO: 438 - RNA, 21 nt, synthetic construct
  source 1..21: mol_type = other RNA
  modified_base 1: mod_base = OTHER; note = 2'-O-methyl modified nucleotide with 3'-phosphorothioate linkage
  modified_base 2: mod_base = OTHER; note = 2'-O-methyl modified nucleotide with 3'-phosphorothioate linkage
  modified_base 3: mod_base = OTHER; note = 2'-O-methyl modified nucleotide
  modified_base 4: mod_base = OTHER; note = 2'-O-methyl modified nucleotide
  modified_base 5: mod_base = OTHER; note = 2'-O-methyl modified nucleotide
  modified_base 6: mod_base = OTHER; note = 2'-O-methyl modified nucleotide
  modified_base 7: mod_base = OTHER; note = 2'-fluoro modified nucleotide
  modified_base 8: mod_base = OTHER; note = 2'-O-methyl modified nucleotide
  modified_base 9: mod_base = OTHER; note = 2'-fluoro modified nucleotide
  modified_base 10: mod_base = OTHER; note = 2'-fluoro modified nucleotide
  modified_base 11: mod_base = OTHER; note = 2'-fluoro modified nucleotide
  modified_base 12: mod_base = OTHER; note = 2'-O-methyl modified nucleotide
  modified_base 13: mod_base = OTHER; note = 2'-O-methyl modified nucleotide
  modified_base 14: mod_base = OTHER; note = 2'-O-methyl modified nucleotide
  modified_base 15: mod_base = OTHER; note = 2'-O-methyl modified nucleotide
  modified_base 16: mod_base = OTHER; note = 2'-O-methyl modified nucleotide
  modified_base 17: mod_base = OTHER; note = 2'-O-methyl modified nucleotide
  modified_base 18: mod_base = OTHER; note = 2'-O-methyl modified nucleotide
  modified_base 19: mod_base = OTHER; note = 2'-O-methyl modified nucleotide
  modified_base 20: mod_base = OTHER; note = 2'-O-methyl modified nucleotide
  modified_base 21: mod_base = OTHER; note = 2'-O-methyl modified nucleotide
cctgctggagtatgaccgcct

SEQ ID NO: 439 - RNA, 21 nt, synthetic construct
  source 1..21: mol_type = other RNA
  modified_base 1: mod_base = OTHER; note = 2'-O-methyl modified nucleotide with 3'-phosphorothioate linkage
  modified_base 2: mod_base = OTHER; note = 2'-O-methyl modified nucleotide with 3'-phosphorothioate linkage
  modified_base 3: mod_base = OTHER; note = 2'-O-methyl modified nucleotide
  modified_base 4: mod_base = OTHER; note = 2'-O-methyl modified nucleotide
  modified_base 5: mod_base = OTHER; note = 2'-O-methyl modified nucleotide
  modified_base 6: mod_base = OTHER; note = 2'-O-methyl modified nucleotide
  modified_base 7: mod_base = OTHER; note = 2'-fluoro modified nucleotide
  modified_base 8: mod_base = OTHER; note = 2'-O-methyl modified nucleotide
  modified_base 9: mod_base = OTHER; note = 2'-fluoro modified nucleotide
  modified_base 10: mod_base = OTHER; note = 2'-fluoro modified nucleotide
  modified_base 11: mod_base = OTHER; note = 2'-fluoro modified nucleotide
  modified_base 12: mod_base = OTHER; note = 2'-O-methyl modified nucleotide
  modified_base 13: mod_base = OTHER; note = 2'-O-methyl modified nucleotide
  modified_base 14: mod_base = OTHER; note = 2'-O-methyl modified nucleotide
  modified_base 15: mod_base = OTHER; note = 2'-O-methyl modified nucleotide
  modified_base 16: mod_base = OTHER; note = 2'-O-methyl modified nucleotide
  modified_base 17: mod_base = OTHER; note = 2'-O-methyl modified nucleotide
  modified_base 18: mod_base = OTHER; note = 2'-O-methyl modified nucleotide
  modified_base 19: mod_base = OTHER; note = 2'-O-methyl modified nucleotide
  modified_base 20: mod_base = OTHER; note = 2'-O-methyl modified nucleotide
  modified_base 21: mod_base = OTHER; note = 2'-O-methyl modified nucleotide
ggagtatgaccgcctggtgga

SEQ ID NO: 440 - RNA, 21 nt, synthetic construct
  source 1..21: mol_type = other RNA
  modified_base 1: mod_base = OTHER; note = 2'-O-methyl modified nucleotide with 3'-phosphorothioate linkage
  modified_base 2: mod_base = OTHER; note = 2'-O-methyl modified nucleotide with 3'-phosphorothioate linkage
  modified_base 3: mod_base = OTHER; note = 2'-O-methyl modified nucleotide
  modified_base 4: mod_base = OTHER; note = 2'-O-methyl modified nucleotide
  modified_base 5: mod_base = OTHER; note = 2'-O-methyl modified nucleotide
  modified_base 6: mod_base = OTHER; note = 2'-O-methyl modified nucleotide
  modified_base 7: mod_base = OTHER; note = 2'-fluoro modified nucleotide
  modified_base 8: mod_base = OTHER; note = 2'-O-methyl modified nucleotide
  modified_base 9: mod_base = OTHER; note = 2'-fluoro modified nucleotide
  modified_base 10: mod_base = OTHER; note = 2'-fluoro modified nucleotide
  modified_base 11: mod_base = OTHER; note = 2'-fluoro modified nucleotide
  modified_base 12: mod_base = OTHER; note = 2'-O-methyl modified nucleotide
  modified_base 13: mod_base = OTHER; note = 2'-O-methyl modified nucleotide
  modified_base 14: mod_base = OTHER; note = 2'-O-methyl modified nucleotide
  modified_base 15: mod_base = OTHER; note = 2'-O-methyl modified nucleotide
  modified_base 16: mod_base = OTHER; note = 2'-O-methyl modified nucleotide
  modified_base 17: mod_base = OTHER; note = 2'-O-methyl modified nucleotide
  modified_base 18: mod_base = OTHER; note = 2'-O-methyl modified nucleotide
  modified_base 19: mod_base = OTHER; note = 2'-O-methyl modified nucleotide
  modified_base 20: mod_base = OTHER; note = 2'-O-methyl modified nucleotide
  modified_base 21: mod_base = OTHER; note = 2'-O-methyl modified nucleotide
gagtatgaccgcctggtggac

SEQ ID NO: 441 - RNA, 21 nt, synthetic construct
  source 1..21: mol_type = other RNA
  modified_base 1: mod_base = OTHER; note = 2'-O-methyl modified nucleotide with 3'-phosphorothioate linkage
  modified_base 2: mod_base = OTHER; note = 2'-O-methyl modified nucleotide with 3'-phosphorothioate linkage
  modified_base 3: mod_base = OTHER; note = 2'-O-methyl modified nucleotide
  modified_base 4: mod_base = OTHER; note = 2'-O-methyl modified nucleotide
  modified_base 5: mod_base = OTHER; note = 2'-O-methyl modified nucleotide
  modified_base 6: mod_base = OTHER; note = 2'-O-methyl modified nucleotide
  modified_base 7: mod_base = OTHER; note = 2'-fluoro modified nucleotide
  modified_base 8: mod_base = OTHER; note = 2'-O-methyl modified nucleotide
  modified_base 9: mod_base = OTHER; note = 2'-fluoro modified nucleotide
  modified_base 10: mod_base = OTHER; note = 2'-fluoro modified nucleotide
  modified_base 11: mod_base = OTHER; note = 2'-fluoro modified nucleotide
  modified_base 12: mod_base = OTHER; note = 2'-O-methyl modified nucleotide
  modified_base 13: mod_base = OTHER; note = 2'-O-methyl modified nucleotide
  modified_base 14: mod_base = OTHER; note = 2'-O-methyl modified nucleotide
  modified_base 15: mod_base = OTHER; note = 2'-O-methyl modified nucleotide
  modified_base 16: mod_base = OTHER; note = 2'-O-methyl modified nucleotide
  modified_base 17: mod_base = OTHER; note = 2'-O-methyl modified nucleotide
  modified_base 18: mod_base = OTHER; note = 2'-O-methyl modified nucleotide
  modified_base 19: mod_base = OTHER; note = 2'-O-methyl modified nucleotide
  modified_base 20: mod_base = OTHER; note = 2'-O-methyl modified nucleotide
  modified_base 21: mod_base = OTHER; note = 2'-O-methyl modified nucleotide
agtatgaccgcctggtggacg

SEQ ID NO: 442 - RNA, 21 nt, synthetic construct
  source 1..21: mol_type = other RNA
  modified_base 1: mod_base = OTHER; note = 2'-O-methyl modified nucleotide with 3'-phosphorothioate linkage
  modified_base 2: mod_base = OTHER; note = 2'-O-methyl modified nucleotide with 3'-phosphorothioate linkage
  modified_base 3: mod_base = OTHER; note = 2'-O-methyl modified nucleotide
  modified_base 4: mod_base = OTHER; note = 2'-O-methyl modified nucleotide
  modified_base 5: mod_base = OTHER; note = 2'-O-methyl modified nucleotide
  modified_base 6: mod_base = OTHER; note = 2'-O-methyl modified nucleotide
  modified_base 7: mod_base = OTHER; note = 2'-fluoro modified nucleotide
  modified_base 8: mod_base = OTHER; note = 2'-O-methyl modified nucleotide
  modified_base 9: mod_base = OTHER; note = 2'-fluoro modified nucleotide
  modified_base 10: mod_base = OTHER; note = 2'-fluoro modified nucleotide
  modified_base 11: mod_base = OTHER; note = 2'-fluoro modified nucleotide
  modified_base 12: mod_base = OTHER; note = 2'-O-methyl modified nucleotide
  modified_base 13: mod_base = OTHER; note = 2'-O-methyl modified nucleotide
  modified_base 14: mod_base = OTHER; note = 2'-O-methyl modified nucleotide
  modified_base 15: mod_base = OTHER; note = 2'-O-methyl modified nucleotide
  modified_base 16: mod_base = OTHER; note = 2'-O-methyl modified nucleotide
  modified_base 17: mod_base = OTHER; note = 2'-O-methyl modified nucleotide
  modified_base 18: mod_base = OTHER; note = 2'-O-methyl modified nucleotide
  modified_base 19: mod_base = OTHER; note = 2'-O-methyl modified nucleotide
  modified_base 20: mod_base = OTHER; note = 2'-O-methyl modified nucleotide
  modified_base 21: mod_base = OTHER; note = 2'-O-methyl modified nucleotide
gtatgaccgcctggtggacga

SEQ ID NO: 443 - RNA, 21 nt, synthetic construct
  source 1..21: mol_type = other RNA
  modified_base 1: mod_base = OTHER; note = 2'-O-methyl modified nucleotide with 3'-phosphorothioate linkage
  modified_base 2: mod_base = OTHER; note = 2'-O-methyl modified nucleotide with 3'-phosphorothioate linkage
  modified_base 3: mod_base = OTHER; note = 2'-O-methyl modified nucleotide
  modified_base 4: mod_base = OTHER; note = 2'-O-methyl modified nucleotide
  modified_base 5: mod_base = OTHER; note = 2'-O-methyl modified nucleotide
  modified_base 6: mod_base = OTHER; note = 2'-O-methyl modified nucleotide
  modified_base 7: mod_base = OTHER; note = 2'-fluoro modified nucleotide
  modified_base 8: mod_base = OTHER; note = 2'-O-methyl modified nucleotide
  modified_base 9: mod_base = OTHER; note = 2'-fluoro modified nucleotide
  modified_base 10: mod_base = OTHER; note = 2'-fluoro modified nucleotide
  modified_base 11: mod_base = OTHER; note = 2'-fluoro modified nucleotide
  modified_base 12: mod_base = OTHER; note = 2'-O-methyl modified nucleotide
  modified_base 13: mod_base = OTHER; note = 2'-O-methyl modified nucleotide
  modified_base 14: mod_base = OTHER; note = 2'-O-methyl modified nucleotide
  modified_base 15: mod_base = OTHER; note = 2'-O-methyl modified nucleotide
  modified_base 16: mod_base = OTHER; note = 2'-O-methyl modified nucleotide
  modified_base 17: mod_base = OTHER; note = 2'-O-methyl modified nucleotide
  modified_base 18: mod_base = OTHER; note = 2'-O-methyl modified nucleotide
  modified_base 19: mod_base = OTHER; note = 2'-O-methyl modified nucleotide
  modified_base 20: mod_base = OTHER; note = 2'-O-methyl modified nucleotide
  modified_base 21: mod_base = OTHER; note = 2'-O-methyl modified nucleotide
tatgaccgcctggtggacgag

SEQ ID NO: 444 - RNA, 21 nt, synthetic construct
  source 1..21: mol_type = other RNA
  modified_base 1: mod_base = OTHER; note = 2'-O-methyl modified nucleotide with 3'-phosphorothioate linkage
  modified_base 2: mod_base = OTHER; note = 2'-O-methyl modified nucleotide with 3'-phosphorothioate linkage
  modified_base 3: mod_base = OTHER; note = 2'-O-methyl modified nucleotide
  modified_base 4: mod_base = OTHER; note = 2'-O-methyl modified nucleotide
  modified_base 5: mod_base = OTHER; note = 2'-O-methyl modified nucleotide
  modified_base 6: mod_base = OTHER; note = 2'-O-methyl modified nucleotide
  modified_base 7: mod_base = OTHER; note = 2'-fluoro modified nucleotide
  modified_base 8: mod_base = OTHER; note = 2'-O-methyl modified nucleotide
  modified_base 9: mod_base = OTHER; note = 2'-fluoro modified nucleotide
  modified_base 10: mod_base = OTHER; note = 2'-fluoro modified nucleotide
  modified_base 11: mod_base = OTHER; note = 2'-fluoro modified nucleotide
  modified_base 12: mod_base = OTHER; note = 2'-O-methyl modified nucleotide
  modified_base 13: mod_base = OTHER; note = 2'-O-methyl modified nucleotide
  modified_base 14: mod_base = OTHER; note = 2'-O-methyl modified nucleotide
  modified_base 15: mod_base = OTHER; note = 2'-O-methyl modified nucleotide
  modified_base 16: mod_base = OTHER; note = 2'-O-methyl modified nucleotide
  modified_base 17: mod_base = OTHER; note = 2'-O-methyl modified nucleotide
  modified_base 18: mod_base = OTHER; note = 2'-O-methyl modified nucleotide
  modified_base 19: mod_base = OTHER; note = 2'-O-methyl modified nucleotide
  modified_base 20: mod_base = OTHER; note = 2'-O-methyl modified nucleotide
  modified_base 21: mod_base = OTHER; note = 2'-O-methyl modified nucleotide
cagcagctgtatgagaagctc

SEQ ID NO: 445 - RNA, 21 nt, synthetic construct
  source 1..21: mol_type = other RNA
  modified_base 1: mod_base = OTHER; note = 2'-O-methyl modified nucleotide with 3'-phosphorothioate linkage
  modified_base 2: mod_base = OTHER; note = 2'-O-methyl modified nucleotide with 3'-phosphorothioate linkage
  modified_base 3: mod_base = OTHER; note = 2'-O-methyl modified nucleotide
  modified_base 4: mod_base = OTHER; note = 2'-O-methyl modified nucleotide
  modified_base 5: mod_base = OTHER; note = 2'-O-methyl modified nucleotide
  modified_base 6: mod_base = OTHER; note = 2'-O-methyl modified nucleotide
  modified_base 7: mod_base = OTHER; note = 2'-fluoro modified nucleotide
  modified_base 8: mod_base = OTHER; note = 2'-O-methyl modified nucleotide
  modified_base 9: mod_base = OTHER; note = 2'-fluoro modified nucleotide
  modified_base 10: mod_base = OTHER; note = 2'-fluoro modified nucleotide
  modified_base 11: mod_base = OTHER; note = 2'-fluoro modified nucleotide
  modified_base 12: mod_base = OTHER; note = 2'-O-methyl modified nucleotide
  modified_base 13: mod_base = OTHER; note = 2'-O-methyl modified nucleotide
  modified_base 14: mod_base = OTHER; note = 2'-O-methyl modified nucleotide
  modified_base 15: mod_base = OTHER; note = 2'-O-methyl modified nucleotide
  modified_base 16: mod_base = OTHER; note = 2'-O-methyl modified nucleotide
  modified_base 17: mod_base = OTHER; note = 2'-O-methyl modified nucleotide
  modified_base 18: mod_base = OTHER; note = 2'-O-methyl modified nucleotide
  modified_base 19: mod_base = OTHER; note = 2'-O-methyl modified nucleotide
  modified_base 20: mod_base = OTHER; note = 2'-O-methyl modified nucleotide
  modified_base 21: mod_base = OTHER; note = 2'-O-methyl modified nucleotide
gctgtatgagaagctcatagg

SEQ ID NO: 446 - RNA, 21 nt, synthetic construct
  source 1..21: mol_type = other RNA
  modified_base 1: mod_base = OTHER; note = 2'-O-methyl modified nucleotide with 3'-phosphorothioate linkage
  modified_base 2: mod_base = OTHER; note = 2'-O-methyl modified nucleotide with 3'-phosphorothioate linkage
  modified_base 3: mod_base = OTHER; note = 2'-O-methyl modified nucleotide
  modified_base 4: mod_base = OTHER; note = 2'-O-methyl modified nucleotide
  modified_base 5: mod_base = OTHER; note = 2'-O-methyl modified nucleotide
  modified_base 6: mod_base = OTHER; note = 2'-O-methyl modified nucleotide
  modified_base 7: mod_base = OTHER; note = 2'-fluoro modified nucleotide
  modified_base 8: mod_base = OTHER; note = 2'-O-methyl modified nucleotide
  modified_base 9: mod_base = OTHER; note = 2'-fluoro modified nucleotide
  modified_base 10: mod_base = OTHER; note = 2'-fluoro modified nucleotide
  modified_base 11: mod_base = OTHER; note = 2'-fluoro modified nucleotide
  modified_base 12: mod_base = OTHER; note = 2'-O-methyl modified nucleotide
  modified_base 13: mod_base = OTHER; note = 2'-O-methyl modified nucleotide
  modified_base 14: mod_base = OTHER; note = 2'-O-methyl modified nucleotide
  modified_base 15: mod_base = OTHER; note = 2'-O-methyl modified nucleotide
  modified_base 16: mod_base = OTHER; note = 2'-O-methyl modified nucleotide
  modified_base 17: mod_base = OTHER; note = 2'-O-methyl modified nucleotide
  modified_base 18: mod_base = OTHER; note = 2'-O-methyl modified nucleotide
  modified_base 19: mod_base = OTHER; note = 2'-O-methyl modified nucleotide
  modified_base 20: mod_base = OTHER; note = 2'-O-methyl modified nucleotide
  modified_base 21: mod_base = OTHER; note = 2'-O-methyl modified nucleotide
tgtatgagaagctcataggtg

SEQ ID NO: 447 - RNA, 21 nt, synthetic construct
  source 1..21: mol_type = other RNA
  modified_base 1: mod_base = OTHER; note = 2'-O-methyl modified nucleotide with 3'-phosphorothioate linkage
  modified_base 2: mod_base = OTHER; note = 2'-O-methyl modified nucleotide with 3'-phosphorothioate linkage
  modified_base 3: mod_base = OTHER; note = 2'-O-methyl modified nucleotide
  modified_base 4: mod_base = OTHER; note = 2'-O-methyl modified nucleotide
  modified_base 5: mod_base = OTHER; note = 2'-O-methyl modified nucleotide
  modified_base 6: mod_base = OTHER; note = 2'-O-methyl modified nucleotide
  modified_base 7: mod_base = OTHER; note = 2'-fluoro modified nucleotide
  modified_base 8: mod_base = OTHER; note = 2'-O-methyl modified nucleotide
  modified_base 9: mod_base = OTHER; note = 2'-fluoro modified nucleotide
  modified_base 10: mod_base = OTHER; note = 2'-fluoro modified nucleotide
  modified_base 11: mod_base = OTHER; note = 2'-fluoro modified nucleotide
  modified_base 12: mod_base = OTHER; note = 2'-O-methyl modified nucleotide
  modified_base 13: mod_base = OTHER; note = 2'-O-methyl modified nucleotide
  modified_base 14: mod_base = OTHER; note = 2'-O-methyl modified nucleotide
  modified_base 15: mod_base = OTHER; note = 2'-O-methyl modified nucleotide
  modified_base 16: mod_base = OTHER; note = 2'-O-methyl modified nucleotide
  modified_base 17: mod_base = OTHER; note = 2'-O-methyl modified nucleotide
  modified_base 18: mod_base = OTHER; note = 2'-O-methyl modified nucleotide
  modified_base 19: mod_base = OTHER; note = 2'-O-methyl modified nucleotide
  modified_base 20: mod_base = OTHER; note = 2'-O-methyl modified nucleotide
  modified_base 21: mod_base = OTHER; note = 2'-O-methyl modified nucleotide
gtatgagaagctcataggtgg

SEQ ID NO: 448 - RNA, 21 nt, synthetic construct
  source 1..21: mol_type = other RNA
  modified_base 1: mod_base = OTHER; note = 2'-O-methyl modified nucleotide with 3'-phosphorothioate linkage
  modified_base 2: mod_base = OTHER; note = 2'-O-methyl modified nucleotide with 3'-phosphorothioate linkage
  modified_base 3: mod_base = OTHER; note = 2'-O-methyl modified nucleotide
  modified_base 4: mod_base = OTHER; note = 2'-O-methyl modified nucleotide
  modified_base 5: mod_base = OTHER; note = 2'-O-methyl modified nucleotide
  modified_base 6: mod_base = OTHER; note = 2'-O-methyl modified nucleotide
  modified_base 7: mod_base = OTHER; note = 2'-fluoro modified nucleotide
  modified_base 8: mod_base = OTHER; note = 2'-O-methyl modified nucleotide
  modified_base 9: mod_base = OTHER; note = 2'-fluoro modified nucleotide
  modified_base 10: mod_base = OTHER; note = 2'-fluoro modified nucleotide
  modified_base 11: mod_base = OTHER; note = 2'-fluoro modified nucleotide
  modified_base 12: mod_base = OTHER; note = 2'-O-methyl modified nucleotide
  modified_base 13: mod_base = OTHER; note = 2'-O-methyl modified nucleotide
  modified_base 14: mod_base = OTHER; note = 2'-O-methyl modified nucleotide
  modified_base 15: mod_base = OTHER; note = 2'-O-methyl modified nucleotide
  modified_base 16: mod_base = OTHER; note = 2'-O-methyl modified nucleotide
  modified_base 17: mod_base = OTHER; note = 2'-O-methyl modified nucleotide
  modified_base 18: mod_base = OTHER; note = 2'-O-methyl modified nucleotide
  modified_base 19: mod_base = OTHER; note = 2'-O-methyl modified nucleotide
  modified_base 20: mod_base = OTHER; note = 2'-O-methyl modified nucleotide
  modified_base 21: mod_base = OTHER; note = 2'-O-methyl modified nucleotide
tatgagaagctcataggtggc

SEQ ID NO: 449 - RNA, 21 nt, synthetic construct
  source 1..21: mol_type = other RNA
  modified_base 1: mod_base = OTHER; note = 2'-O-methyl modified nucleotide with 3'-phosphorothioate linkage
  modified_base 2: mod_base = OTHER; note = 2'-O-methyl modified nucleotide with 3'-phosphorothioate linkage
  modified_base 3: mod_base = OTHER; note = 2'-O-methyl modified nucleotide
  modified_base 4: mod_base = OTHER; note = 2'-O-methyl modified nucleotide
  modified_base 5: mod_base = OTHER; note = 2'-O-methyl modified nucleotide
  modified_base 6: mod_base = OTHER; note = 2'-O-methyl modified nucleotide
  modified_base 7: mod_base = OTHER; note = 2'-fluoro modified nucleotide
  modified_base 8: mod_base = OTHER; note = 2'-O-methyl modified nucleotide
  modified_base 9: mod_base = OTHER; note = 2'-fluoro modified nucleotide
  modified_base 10: mod_base = OTHER; note = 2'-fluoro modified nucleotide
  modified_base 11: mod_base = OTHER; note = 2'-fluoro modified nucleotide
  modified_base 12: mod_base = OTHER; note = 2'-O-methyl modified nucleotide
  modified_base 13: mod_base = OTHER; note = 2'-O-methyl modified nucleotide
  modified_base 14: mod_base = OTHER; note = 2'-O-methyl modified nucleotide
  modified_base 15: mod_base = OTHER; note = 2'-O-methyl modified nucleotide
  modified_base 16: mod_base = OTHER; note = 2'-O-methyl modified nucleotide
  modified_base 17: mod_base = OTHER; note = 2'-O-methyl modified nucleotide
  modified_base 18: mod_base = OTHER; note = 2'-O-methyl modified nucleotide
  modified_base 19: mod_base = OTHER; note = 2'-O-methyl modified nucleotide
  modified_base 20: mod_base = OTHER; note = 2'-O-methyl modified nucleotide
  modified_base 21: mod_base = OTHER; note = 2'-O-methyl modified nucleotide
atgagaagctcataggtggca

SEQ ID NO: 450 - RNA, 21 nt, synthetic construct
  source 1..21: mol_type = other RNA
  modified_base 1: mod_base = OTHER; note = 2'-O-methyl modified nucleotide with 3'-phosphorothioate linkage
  modified_base 2: mod_base = OTHER; note = 2'-O-methyl modified nucleotide with 3'-phosphorothioate linkage
  modified_base 3: mod_base = OTHER; note = 2'-O-methyl modified nucleotide
  modified_base 4: mod_base = OTHER; note = 2'-O-methyl modified nucleotide
  modified_base 5: mod_base = OTHER; note = 2'-O-methyl modified nucleotide
  modified_base 6: mod_base = OTHER; note = 2'-O-methyl modified nucleotide
  modified_base 7: mod_base = OTHER; note = 2'-fluoro modified nucleotide
  modified_base 8: mod_base = OTHER; note = 2'-O-methyl modified nucleotide
  modified_base 9: mod_base = OTHER; note = 2'-fluoro modified nucleotide
  modified_base 10: mod_base = OTHER; note = 2'-fluoro modified nucleotide
  modified_base 11: mod_base = OTHER; note = 2'-fluoro modified nucleotide
  modified_base 12: mod_base = OTHER; note = 2'-O-methyl modified nucleotide
  modified_base 13: mod_base = OTHER; note = 2'-O-methyl modified nucleotide
  modified_base 14: mod_base = OTHER; note = 2'-O-methyl modified nucleotide
  modified_base 15: mod_base = OTHER; note = 2'-O-methyl modified nucleotide
  modified_base 16: mod_base = OTHER; note = 2'-O-methyl modified nucleotide
  modified_base 17: mod_base = OTHER; note = 2'-O-methyl modified nucleotide
  modified_base 18: mod_base = OTHER; note = 2'-O-methyl modified nucleotide
  modified_base 19: mod_base = OTHER; note = 2'-O-methyl modified nucleotide
  modified_base 20: mod_base = OTHER; note = 2'-O-methyl modified nucleotide
  modified_base 21: mod_base = OTHER; note = 2'-O-methyl modified nucleotide
aagctcataggtggcaagtac

SEQ ID NO: 451 - RNA, 21 nt, synthetic construct
  source 1..21: mol_type = other RNA
  modified_base 1: mod_base = OTHER; note = 2'-O-methyl modified nucleotide with 3'-phosphorothioate linkage
  modified_base 2: mod_base = OTHER; note = 2'-O-methyl modified nucleotide with 3'-phosphorothioate linkage
  modified_base 3: mod_base = OTHER; note = 2'-O-methyl modified nucleotide
  modified_base 4: mod_base = OTHER; note = 2'-O-methyl modified nucleotide
  modified_base 5: mod_base = OTHER; note = 2'-O-methyl modified nucleotide
  modified_base 6: mod_base = OTHER; note = 2'-O-methyl modified nucleotide
  modified_base 7: mod_base = OTHER; note = 2'-fluoro modified nucleotide
  modified_base 8: mod_base = OTHER; note = 2'-O-methyl modified nucleotide
  modified_base 9: mod_base = OTHER; note = 2'-fluoro modified nucleotide
  modified_base 10: mod_base = OTHER; note = 2'-fluoro modified nucleotide
  modified_base 11: mod_base = OTHER; note = 2'-fluoro modified nucleotide
  modified_base 12: mod_base = OTHER; note = 2'-O-methyl modified nucleotide
  modified_base 13: mod_base = OTHER; note = 2'-O-methyl modified nucleotide
  modified_base 14: mod_base = OTHER; note = 2'-O-methyl modified nucleotide
  modified_base 15: mod_base = OTHER; note = 2'-O-methyl modified nucleotide
  modified_base 16: mod_base = OTHER; note = 2'-O-methyl modified nucleotide
  modified_base 17: mod_base = OTHER; note = 2'-O-methyl modified nucleotide
  modified_base 18: mod_base = OTHER; note = 2'-O-methyl modified nucleotide
  modified_base 19: mod_base = OTHER; note = 2'-O-methyl modified nucleotide
  modified_base 20: mod_base = OTHER; note = 2'-O-methyl modified nucleotide
  modified_base 21: mod_base = OTHER; note = 2'-O-methyl modified nucleotide
agctcataggtggcaagtaca

SEQ ID NO: 452 - RNA, 21 nt, synthetic construct
  source 1..21: mol_type = other RNA
  modified_base 1: mod_base = OTHER; note = 2'-O-methyl modified nucleotide with 3'-phosphorothioate linkage
  modified_base 2: mod_base = OTHER; note = 2'-O-methyl modified nucleotide with 3'-phosphorothioate linkage
  modified_base 3: mod_base = OTHER; note = 2'-O-methyl modified nucleotide
  modified_base 4: mod_base = OTHER; note = 2'-O-methyl modified nucleotide
  modified_base 5: mod_base = OTHER; note = 2'-O-methyl modified nucleotide
  modified_base 6: mod_base = OTHER; note = 2'-O-methyl modified nucleotide
  modified_base 7: mod_base = OTHER; note = 2'-fluoro modified nucleotide
  modified_base 8: mod_base = OTHER; note = 2'-O-methyl modified nucleotide
  modified_base 9: mod_base = OTHER; note = 2'-fluoro modified nucleotide
  modified_base 10: mod_base = OTHER; note = 2'-fluoro modified nucleotide
  modified_base 11: mod_base = OTHER; note = 2'-fluoro modified nucleotide
  modified_base 12: mod_base = OTHER; note = 2'-O-methyl modified nucleotide
  modified_base 13: mod_base = OTHER; note = 2'-O-methyl modified nucleotide
  modified_base 14: mod_base = OTHER; note = 2'-O-methyl modified nucleotide
  modified_base 15: mod_base = OTHER; note = 2'-O-methyl modified nucleotide
  modified_base 16: mod_base = OTHER; note = 2'-O-methyl modified nucleotide
  modified_base 17: mod_base = OTHER; note = 2'-O-methyl modified nucleotide
  modified_base 18: mod_base = OTHER; note = 2'-O-methyl modified nucleotide
  modified_base 19: mod_base = OTHER; note = 2'-O-methyl modified nucleotide
  modified_base 20: mod_base = OTHER; note = 2'-O-methyl modified nucleotide
  modified_base 21: mod_base = OTHER; note = 2'-O-methyl modified nucleotide
tcataggtggcaagtacatgg

SEQ ID NO: 453 - RNA, 21 nt, synthetic construct
  source 1..21: mol_type = other RNA
  modified_base 1: mod_base = OTHER; note = 2'-O-methyl modified nucleotide with 3'-phosphorothioate linkage
  modified_base 2: mod_base = OTHER; note = 2'-O-methyl modified nucleotide with 3'-phosphorothioate linkage
  modified_base 3: mod_base = OTHER; note = 2'-O-methyl modified nucleotide
  modified_base 4: mod_base = OTHER; note = 2'-O-methyl modified nucleotide
  modified_base 5: mod_base = OTHER; note = 2'-O-methyl modified nucleotide
  modified_base 6: mod_base = OTHER; note = 2'-O-methyl modified nucleotide
  modified_base 7: mod_base = OTHER; note = 2'-fluoro modified nucleotide
  modified_base 8: mod_base = OTHER; note = 2'-O-methyl modified nucleotide
  modified_base 9: mod_base = OTHER; note = 2'-fluoro modified nucleotide
  modified_base 10: mod_base = OTHER; note = 2'-fluoro modified nucleotide
  modified_base 11: mod_base = OTHER; note = 2'-fluoro modified nucleotide
  modified_base 12: mod_base = OTHER; note = 2'-O-methyl modified nucleotide
  modified_base 13: mod_base = OTHER; note = 2'-O-methyl modified nucleotide
  modified_base 14: mod_base = OTHER; note = 2'-O-methyl modified nucleotide
  modified_base 15: mod_base = OTHER; note = 2'-O-methyl modified nucleotide
  modified_base 16: mod_base = OTHER; note = 2'-O-methyl modified nucleotide
  modified_base 17: mod_base = OTHER; note = 2'-O-methyl modified nucleotide
  modified_base 18: mod_base = OTHER; note = 2'-O-methyl modified nucleotide
  modified_base 19: mod_base = OTHER; note = 2'-O-methyl modified nucleotide
  modified_base 20: mod_base = OTHER; note = 2'-O-methyl modified nucleotide
  modified_base 21: mod_base = OTHER; note = 2'-O-methyl modified nucleotide
aggtggcaagtacatgggcga

SEQ ID NO: 454 - RNA, 21 nt, synthetic construct
  source 1..21: mol_type = other RNA
  modified_base 1: mod_base = OTHER; note = 2'-O-methyl modified nucleotide with 3'-phosphorothioate linkage
  modified_base 2: mod_base = OTHER; note = 2'-O-methyl modified nucleotide with 3'-phosphorothioate linkage
  modified_base 3: mod_base = OTHER; note = 2'-O-methyl modified nucleotide
  modified_base 4: mod_base = OTHER; note = 2'-O-methyl modified nucleotide
  modified_base 5: mod_base = OTHER; note = 2'-O-methyl modified nucleotide
  modified_base 6: mod_base = OTHER; note = 2'-O-methyl modified nucleotide
  modified_base 7: mod_base = OTHER; note = 2'-fluoro modified nucleotide
  modified_base 8: mod_base = OTHER; note = 2'-O-methyl modified nucleotide
  modified_base 9: mod_base = OTHER; note = 2'-fluoro modified nucleotide
  modified_base 10: mod_base = OTHER; note = 2'-fluoro modified nucleotide
  modified_base 11: mod_base = OTHER; note = 2'-fluoro modified nucleotide
  modified_base 12: mod_base = OTHER; note = 2'-O-methyl modified nucleotide
  modified_base 13: mod_base = OTHER; note = 2'-O-methyl modified nucleotide
  modified_base 14: mod_base = OTHER; note = 2'-O-methyl modified nucleotide
  modified_base 15: mod_base = OTHER; note = 2'-O-methyl modified nucleotide
  modified_base 16: mod_base = OTHER; note = 2'-O-methyl modified nucleotide
  modified_base 17: mod_base = OTHER; note = 2'-O-methyl modified nucleotide
  modified_base 18: mod_base = OTHER; note = 2'-O-methyl modified nucleotide
  modified_base 19: mod_base = OTHER; note = 2'-O-methyl modified nucleotide
  modified_base 20: mod_base = OTHER; note = 2'-O-methyl modified nucleotide
  modified_base 21: mod_base = OTHER; note = 2'-O-methyl modified nucleotide
gtggcaagtacatgggcgagc

SEQ ID NO: 455 - RNA, 21 nt, synthetic construct
  source 1..21: mol_type = other RNA
  modified_base 1: mod_base = OTHER; note = 2'-O-methyl modified nucleotide with 3'-phosphorothioate linkage
  modified_base 2: mod_base = OTHER; note = 2'-O-methyl modified nucleotide with 3'-phosphorothioate linkage
  modified_base 3: mod_base = OTHER; note = 2'-O-methyl modified nucleotide
  modified_base 4: mod_base = OTHER; note = 2'-O-methyl modified nucleotide
  modified_base 5: mod_base = OTHER; note = 2'-O-methyl modified nucleotide
  modified_base 6: mod_base = OTHER; note = 2'-O-methyl modified nucleotide
  modified_base 7: mod_base = OTHER; note = 2'-fluoro modified nucleotide
  modified_base 8: mod_base = OTHER; note = 2'-O-methyl modified nucleotide
  modified_base 9: mod_base = OTHER; note = 2'-fluoro modified nucleotide
  modified_base 10: mod_base = OTHER; note = 2'-fluoro modified nucleotide
  modified_base 11: mod_base = OTHER; note = 2'-fluoro modified nucleotide
  modified_base 12: mod_base = OTHER; note = 2'-O-methyl modified nucleotide
  modified_base 13: mod_base = OTHER; note = 2'-O-methyl modified nucleotide
  modified_base 14: mod_base = OTHER; note = 2'-O-methyl modified nucleotide
  modified_base 15: mod_base = OTHER; note = 2'-O-methyl modified nucleotide
  modified_base 16: mod_base = OTHER; note = 2'-O-methyl modified nucleotide
  modified_base 17: mod_base = OTHER; note = 2'-O-methyl modified nucleotide
  modified_base 18: mod_base = OTHER; note = 2'-O-methyl modified nucleotide
  modified_base 19: mod_base = OTHER; note = 2'-O-methyl modified nucleotide
  modified_base 20: mod_base = OTHER; note = 2'-O-methyl modified nucleotide
  modified_base 21: mod_base = OTHER; note = 2'-O-methyl modified nucleotide
ggcaagtacatgggcgagctg

SEQ ID NO: 456 - RNA, 21 nt, synthetic construct
  source 1..21: mol_type = other RNA
  modified_base 1: mod_base = OTHER; note = 2'-O-methyl modified nucleotide with 3'-phosphorothioate linkage
  modified_base 2: mod_base = OTHER; note = 2'-O-methyl modified nucleotide with 3'-phosphorothioate linkage
  modified_base 3: mod_base = OTHER; note = 2'-O-methyl modified nucleotide
  modified_base 4: mod_base = OTHER; note = 2'-O-methyl modified nucleotide
  modified_base 5: mod_base = OTHER; note = 2'-O-methyl modified nucleotide
  modified_base 6: mod_base = OTHER; note = 2'-O-methyl modified nucleotide
  modified_base 7: mod_base = OTHER; note = 2'-fluoro modified nucleotide
  modified_base 8: mod_base = OTHER; note = 2'-O-methyl modified nucleotide
  modified_base 9: mod_base = OTHER; note = 2'-fluoro modified nucleotide
  modified_base 10: mod_base = OTHER; note = 2'-fluoro modified nucleotide
  modified_base 11: mod_base = OTHER; note = 2'-fluoro modified nucleotide
  modified_base 12: mod_base = OTHER; note = 2'-O-methyl modified nucleotide
  modified_base 13: mod_base = OTHER; note = 2'-O-methyl modified nucleotide
  modified_base 14: mod_base = OTHER; note = 2'-O-methyl modified nucleotide
  modified_base 15: mod_base = OTHER; note = 2'-O-methyl modified nucleotide
  modified_base 16: mod_base = OTHER; note = 2'-O-methyl modified nucleotide
  modified_base 17: mod_base = OTHER; note = 2'-O-methyl modified nucleotide
  modified_base 18: mod_base = OTHER; note = 2'-O-methyl modified nucleotide
  modified_base 19: mod_base = OTHER; note = 2'-O-methyl modified nucleotide
  modified_base 20: mod_base = OTHER; note = 2'-O-methyl modified nucleotide
  modified_base 21: mod_base = OTHER; note = 2'-O-methyl modified nucleotide
gctgctcaggctcgtggacga

SEQ ID NO: 457 - RNA, 21 nt, synthetic construct
  source 1..21: mol_type = other RNA
  modified_base 1: mod_base = OTHER; note = 2'-O-methyl modified nucleotide with 3'-phosphorothioate linkage
  modified_base 2: mod_base = OTHER; note = 2'-O-methyl modified nucleotide with 3'-phosphorothioate linkage
  modified_base 3: mod_base = OTHER; note = 2'-O-methyl modified nucleotide
  modified_base 4: mod_base = OTHER; note = 2'-O-methyl modified nucleotide
  modified_base 5: mod_base = OTHER; note = 2'-O-methyl modified nucleotide
  modified_base 6: mod_base = OTHER; note = 2'-O-methyl modified nucleotide
  modified_base 7: mod_base = OTHER; note = 2'-fluoro modified nucleotide
  modified_base 8: mod_base = OTHER; note = 2'-O-methyl modified nucleotide
  modified_base 9: mod_base = OTHER; note = 2'-fluoro modified nucleotide
  modified_base 10: mod_base = OTHER; note = 2'-fluoro modified nucleotide
  modified_base 11: mod_base = OTHER; note = 2'-fluoro modified nucleotide
  modified_base 12: mod_base = OTHER; note = 2'-O-methyl modified nucleotide
  modified_base 13: mod_base = OTHER; note = 2'-O-methyl modified nucleotide
  modified_base 14: mod_base = OTHER; note = 2'-O-methyl modified nucleotide
  modified_base 15: mod_base = OTHER; note = 2'-O-methyl modified nucleotide
  modified_base 16: mod_base = OTHER; note = 2'-O-methyl modified nucleotide
  modified_base 17: mod_base = OTHER; note = 2'-O-methyl modified nucleotide
  modified_base 18: mod_base = OTHER; note = 2'-O-methyl modified nucleotide
  modified_base 19: mod_base = OTHER; note = 2'-O-methyl modified nucleotide
  modified_base 20: mod_base = OTHER; note = 2'-O-methyl modified nucleotide
  modified_base 21: mod_base = OTHER; note = 2'-O-methyl modified nucleotide
ctgctcaggctcgtggacgaa

SEQ ID NO: 458 - RNA, 21 nt, synthetic construct
  source 1..21: mol_type = other RNA
  modified_base 1: mod_base = OTHER; note = 2'-O-methyl modified nucleotide with 3'-phosphorothioate linkage
  modified_base 2: mod_base = OTHER; note = 2'-O-methyl modified nucleotide with 3'-phosphorothioate linkage
  modified_base 3: mod_base = OTHER; note = 2'-O-methyl modified nucleotide
  modified_base 4: mod_base = OTHER; note = 2'-O-methyl modified nucleotide
  modified_base 5: mod_base = OTHER; note = 2'-O-methyl modified nucleotide
  modified_base 6: mod_base = OTHER; note = 2'-O-methyl modified nucleotide
  modified_base 7: mod_base = OTHER; note = 2'-fluoro modified nucleotide
  modified_base 8: mod_base = OTHER; note = 2'-O-methyl modified nucleotide
  modified_base 9: mod_base = OTHER; note = 2'-fluoro modified nucleotide
  modified_base 10: mod_base = OTHER; note = 2'-fluoro modified nucleotide
  modified_base 11: mod_base = OTHER; note = 2'-fluoro modified nucleotide
  modified_base 12: mod_base = OTHER; note = 2'-O-methyl modified nucleotide
  modified_base 13: mod_base = OTHER; note = 2'-O-methyl modified nucleotide
  modified_base 14: mod_base = OTHER; note = 2'-O-methyl modified nucleotide
  modified_base 15: mod_base = OTHER; note = 2'-O-methyl modified nucleotide
  modified_base 16: mod_base = OTHER; note = 2'-O-methyl modified nucleotide
  modified_base 17: mod_base = OTHER; note = 2'-O-methyl modified nucleotide
  modified_base 18: mod_base = OTHER; note = 2'-O-methyl modified nucleotide
  modified_base 19: mod_base = OTHER; note = 2'-O-methyl modified nucleotide
  modified_base 20: mod_base = OTHER; note = 2'-O-methyl modified nucleotide
  modified_base 21: mod_base = OTHER; note = 2'-O-methyl modified nucleotide
cgaccgcaagcagatctacaa

SEQ ID NO: 459 - RNA, 21 nt, synthetic construct
  source 1..21: mol_type = other RNA
  modified_base 1: mod_base = OTHER; note = 2'-O-methyl modified nucleotide with 3'-phosphorothioate linkage
  modified_base 2: mod_base = OTHER; note = 2'-O-methyl modified nucleotide with 3'-phosphorothioate linkage
  modified_base 3: mod_base = OTHER; note = 2'-O-methyl modified nucleotide
  modified_base 4: mod_base = OTHER; note = 2'-O-methyl modified nucleotide
  modified_base 5: mod_base = OTHER; note = 2'-O-methyl modified nucleotide
  modified_base 6: mod_base = OTHER; note = 2'-O-methyl modified nucleotide
  modified_base 7: mod_base = OTHER; note = 2'-fluoro modified nucleotide
  modified_base 8: mod_base = OTHER; note = 2'-O-methyl modified nucleotide
  modified_base 9: mod_base = OTHER; note = 2'-fluoro modified nucleotide
  modified_base 10: mod_base = OTHER; note = 2'-fluoro modified nucleotide
  modified_base 11: mod_base = OTHER; note = 2'-fluoro modified nucleotide
  modified_base 12: mod_base = OTHER; note = 2'-O-methyl modified nucleotide
  modified_base 13: mod_base = OTHER; note = 2'-O-methyl modified nucleotide
  modified_base 14: mod_base = OTHER; note = 2'-O-methyl modified nucleotide
  modified_base 15: mod_base = OTHER; note = 2'-O-methyl modified nucleotide
  modified_base 16: mod_base = OTHER; note = 2'-O-methyl modified nucleotide
  modified_base 17: mod_base = OTHER; note = 2'-O-methyl modified nucleotide
  modified_base 18: mod_base = OTHER; note = 2'-O-methyl modified nucleotide
  modified_base 19: mod_base = OTHER; note = 2'-O-methyl modified nucleotide
  modified_base 20: mod_base = OTHER; note = 2'-O-methyl modified nucleotide
  modified_base 21: mod_base = OTHER; note = 2'-O-methyl modified nucleotide
agcagatctacaacatcctga

SEQ ID NO: 460 - RNA, 21 nt, synthetic construct
  source 1..21: mol_type = other RNA
  modified_base 1: mod_base = OTHER; note = 2'-O-methyl modified nucleotide with 3'-phosphorothioate linkage
  modified_base 2: mod_base = OTHER; note = 2'-O-methyl modified nucleotide with 3'-phosphorothioate linkage
  modified_base 3: mod_base = OTHER; note = 2'-O-methyl modified nucleotide
  modified_base 4: mod_base = OTHER; note = 2'-O-methyl modified nucleotide
  modified_base 5: mod_base = OTHER; note = 2'-O-methyl modified nucleotide
  modified_base 6: mod_base = OTHER; note = 2'-O-methyl modified nucleotide
  modified_base 7: mod_base = OTHER; note = 2'-fluoro modified nucleotide
  modified_base 8: mod_base = OTHER; note = 2'-O-methyl modified nucleotide
  modified_base 9: mod_base = OTHER; note = 2'-fluoro modified nucleotide
  modified_base 10: mod_base = OTHER; note = 2'-fluoro modified nucleotide
  modified_base 11: mod_base = OTHER; note = 2'-fluoro modified nucleotide
  modified_base 12: mod_base = OTHER; note = 2'-O-methyl modified nucleotide
  modified_base 13: mod_base = OTHER; note = 2'-O-methyl modified nucleotide
  modified_base 14: mod_base = OTHER; note = 2'-O-methyl modified nucleotide
  modified_base 15: mod_base = OTHER; note = 2'-O-methyl modified nucleotide
  modified_base 16: mod_base = OTHER; note = 2'-O-methyl modified nucleotide
  modified_base 17: mod_base = OTHER; note = 2'-O-methyl modified nucleotide
  modified_base 18: mod_base = OTHER; note = 2'-O-methyl modified nucleotide
  modified_base 19: mod_base = OTHER; note = 2'-O-methyl modified nucleotide
  modified_base 20: mod_base = OTHER; note = 2'-O-methyl modified nucleotide
  modified_base 21: mod_base = OTHER; note = 2'-O-methyl modified nucleotide
atctacaacatcctgagcacg

SEQ ID NO: 461 - RNA, 21 nt, synthetic construct
  source 1..21: mol_type = other RNA
  modified_base 1: mod_base = OTHER; note = 2'-O-methyl modified nucleotide with 3'-phosphorothioate linkage
  modified_base 2: mod_base = OTHER; note = 2'-O-methyl modified nucleotide with 3'-phosphorothioate linkage
  modified_base 3: mod_base = OTHER; note = 2'-O-methyl modified nucleotide
  modified_base 4: mod_base = OTHER; note = 2'-O-methyl modified nucleotide
  modified_base 5: mod_base = OTHER; note = 2'-O-methyl modified nucleotide
  modified_base 6: mod_base = OTHER; note = 2'-O-methyl modified nucleotide
  modified_base 7: mod_base = OTHER; note = 2'-fluoro modified nucleotide
  modified_base 8: mod_base = OTHER; note = 2'-O-methyl modified nucleotide
  modified_base 9: mod_base = OTHER; note = 2'-fluoro modified nucleotide
  modified_base 10: mod_base = OTHER; note = 2'-fluoro modified nucleotide
  modified_base 11: mod_base = OTHER; note = 2'-fluoro modified nucleotide
  modified_base 12: mod_base = OTHER; note = 2'-O-methyl modified nucleotide
  modified_base 13: mod_base = OTHER; note = 2'-O-methyl modified nucleotide
  modified_base 14: mod_base = OTHER; note = 2'-O-methyl modified nucleotide
  modified_base 15: mod_base = OTHER; note = 2'-O-methyl modified nucleotide
  modified_base 16: mod_base = OTHER; note = 2'-O-methyl modified nucleotide
  modified_base 17: mod_base = OTHER; note = 2'-O-methyl modified nucleotide
  modified_base 18: mod_base = OTHER; note = 2'-O-methyl modified nucleotide
  modified_base 19: mod_base = OTHER; note = 2'-O-methyl modified nucleotide
  modified_base 20: mod_base = OTHER; note = 2'-O-methyl modified nucleotide
  modified_base 21: mod_base = OTHER; note = 2'-O-methyl modified nucleotide
ctacaacatcctgagcacgct

SEQ ID NO: 462 - RNA, 21 nt, synthetic construct
  source 1..21: mol_type = other RNA
  modified_base 1: mod_base = OTHER; note = 2'-O-methyl modified nucleotide with 3'-phosphorothioate linkage
  modified_base 2: mod_base = OTHER; note = 2'-O-methyl modified nucleotide with 3'-phosphorothioate linkage
  modified_base 3: mod_base = OTHER; note = 2'-O-methyl modified nucleotide
  modified_base 4: mod_base = OTHER; note = 2'-O-methyl modified nucleotide
  modified_base 5: mod_base = OTHER; note = 2'-O-methyl modified nucleotide
  modified_base 6: mod_base = OTHER; note = 2'-O-methyl modified nucleotide
  modified_base 7: mod_base = OTHER; note = 2'-fluoro modified nucleotide
  modified_base 8: mod_base = OTHER; note = 2'-O-methyl modified nucleotide
  modified_base 9: mod_base = OTHER; note = 2'-fluoro modified nucleotide
  modified_base 10: mod_base = OTHER; note = 2'-fluoro modified nucleotide
  modified_base 11: mod_base = OTHER; note = 2'-fluoro modified nucleotide
  modified_base 12: mod_base = OTHER; note = 2'-O-methyl modified nucleotide
  modified_base 13: mod_base = OTHER; note = 2'-O-methyl modified nucleotide
  modified_base 14: mod_base = OTHER; note = 2'-O-methyl modified nucleotide
  modified_base 15: mod_base = OTHER; note = 2'-O-methyl modified nucleotide
  modified_base 16: mod_base = OTHER; note = 2'-O-methyl modified nucleotide
  modified_base 17: mod_base = OTHER; note = 2'-O-methyl modified nucleotide
  modified_base 18: mod_base = OTHER; note = 2'-O-methyl modified nucleotide
  modified_base 19: mod_base = OTHER; note = 2'-O-methyl modified nucleotide
  modified_base 20: mod_base = OTHER; note = 2'-O-methyl modified nucleotide
  modified_base 21: mod_base = OTHER; note = 2'-O-methyl modified nucleotide
atgcgcatcactgtgggcgtg

SEQ ID NO: 463 - RNA, 21 nt, synthetic construct
  source 1..21: mol_type = other RNA
  modified_base 1: mod_base = OTHER; note = 2'-O-methyl modified nucleotide with 3'-phosphorothioate linkage
  modified_base 2: mod_base = OTHER; note = 2'-O-methyl modified nucleotide with 3'-phosphorothioate linkage
  modified_base 3: mod_base = OTHER; note = 2'-O-methyl modified nucleotide
  modified_base 4: mod_base = OTHER; note = 2'-O-methyl modified nucleotide
  modified_base 5: mod_base = OTHER; note = 2'-O-methyl modified nucleotide
  modified_base 6: mod_base = OTHER; note = 2'-O-methyl modified nucleotide
  modified_base 7: mod_base = OTHER; note = 2'-fluoro modified nucleotide
  modified_base 8: mod_base = OTHER; note = 2'-O-methyl modified nucleotide
  modified_base 9: mod_base = OTHER; note = 2'-fluoro modified nucleotide
  modified_base 10: mod_base = OTHER; note = 2'-fluoro modified nucleotide
  modified_base 11: mod_base = OTHER; note = 2'-fluoro modified nucleotide
  modified_base 12: mod_base = OTHER; note = 2'-O-methyl modified nucleotide
  modified_base 13: mod_base = OTHER; note = 2'-O-methyl modified nucleotide
  modified_base 14: mod_base = OTHER; note = 2'-O-methyl modified nucleotide
  modified_base 15: mod_base = OTHER; note = 2'-O-methyl modified nucleotide
  modified_base 16: mod_base = OTHER; note = 2'-O-methyl modified nucleotide
  modified_base 17: mod_base = OTHER; note = 2'-O-methyl modified nucleotide
  modified_base 18: mod_base = OTHER; note = 2'-O-methyl modified nucleotide
  modified_base 19: mod_base = OTHER; note = 2'-O-methyl modified nucleotide
  modified_base 20: mod_base = OTHER; note = 2'-O-methyl modified nucleotide
  modified_base 21: mod_base = OTHER; note = 2'-O-methyl modified nucleotide
tcactgtgggcgtggatggct

SEQ ID NO: 464 - RNA, 21 nt, synthetic construct
  source 1..21: mol_type = other RNA
  modified_base 1: mod_base = OTHER; note = 2'-O-methyl modified nucleotide with 3'-phosphorothioate linkage
  modified_base 2: mod_base = OTHER; note = 2'-O-methyl modified nucleotide with 3'-phosphorothioate linkage
  modified_base 3: mod_base = OTHER; note = 2'-O-methyl modified nucleotide
  modified_base 4: mod_base = OTHER; note = 2'-O-methyl modified nucleotide
  modified_base 5: mod_base = OTHER; note = 2'-O-methyl modified nucleotide
  modified_base 6: mod_base = OTHER; note = 2'-O-methyl modified nucleotide
  modified_base 7: mod_base = OTHER; note = 2'-fluoro modified nucleotide
  modified_base 8: mod_base = OTHER; note = 2'-O-methyl modified nucleotide
  modified_base 9: mod_base = OTHER; note = 2'-fluoro modified nucleotide
  modified_base 10: mod_base = OTHER; note = 2'-fluoro modified nucleotide
  modified_base 11: mod_base = OTHER; note = 2'-fluoro modified nucleotide
  modified_base 12: mod_base = OTHER; note = 2'-O-methyl modified nucleotide
  modified_base 13: mod_base = OTHER; note = 2'-O-methyl modified nucleotide
  modified_base 14: mod_base = OTHER; note = 2'-O-methyl modified nucleotide
  modified_base 15: mod_base = OTHER; note = 2'-O-methyl modified nucleotide
  modified_base 16: mod_base = OTHER; note = 2'-O-methyl modified nucleotide
  modified_base 17: mod_base = OTHER; note = 2'-O-methyl modified nucleotide
  modified_base 18: mod_base = OTHER; note = 2'-O-methyl modified nucleotide
  modified_base 19: mod_base = OTHER; note = 2'-O-methyl modified nucleotide
  modified_base 20: mod_base = OTHER; note = 2'-O-methyl modified nucleotide
  modified_base 21: mod_base = OTHER; note = 2'-O-methyl modified nucleotide
cactgtgggcgtggatggctc

SEQ ID NO: 465 - RNA, 21 nt, synthetic construct
  source 1..21: mol_type = other RNA
  modified_base 1: mod_base = OTHER; note = 2'-O-methyl modified nucleotide with 3'-phosphorothioate linkage
  modified_base 2: mod_base = OTHER; note = 2'-O-methyl modified nucleotide with 3'-phosphorothioate linkage
  modified_base 3: mod_base = OTHER; note = 2'-O-methyl modified nucleotide
  modified_base 4: mod_base = OTHER; note = 2'-O-methyl modified nucleotide
  modified_base 5: mod_base = OTHER; note = 2'-O-methyl modified nucleotide
  modified_base 6: mod_base = OTHER; note = 2'-O-methyl modified nucleotide
  modified_base 7: mod_base = OTHER; note = 2'-fluoro modified nucleotide
  modified_base 8: mod_base = OTHER; note = 2'-O-methyl modified nucleotide
  modified_base 9: mod_base = OTHER; note = 2'-fluoro modified nucleotide
  modified_base 10: mod_base = OTHER; note = 2'-fluoro modified nucleotide
  modified_base 11: mod_base = OTHER; note = 2'-fluoro modified nucleotide
  modified_base 12: mod_base = OTHER; note = 2'-O-methyl modified nucleotide
  modified_base 13: mod_base = OTHER; note = 2'-O-methyl modified nucleotide
  modified_base 14: mod_base = OTHER; note = 2'-O-methyl modified nucleotide
  modified_base 15: mod_base = OTHER; note = 2'-O-methyl modified nucleotide
  modified_base 16: mod_base = OTHER; note = 2'-O-methyl modified nucleotide
  modified_base 17: mod_base = OTHER; note = 2'-O-methyl modified nucleotide
  modified_base 18: mod_base = OTHER; note = 2'-O-methyl modified nucleotide
  modified_base 19: mod_base = OTHER; note = 2'-O-methyl modified nucleotide
  modified_base 20: mod_base = OTHER; note = 2'-O-methyl modified nucleotide
  modified_base 21: mod_base = OTHER; note = 2'-O-methyl modified nucleotide
actgtgggcgtggatggctcc

SEQ ID NO: 466 - RNA, 21 nt, synthetic construct
  source 1..21: mol_type = other RNA
  modified_base 1: mod_base = OTHER; note = 2'-O-methyl modified nucleotide with 3'-phosphorothioate linkage
  modified_base 2: mod_base = OTHER; note = 2'-O-methyl modified nucleotide with 3'-phosphorothioate linkage
  modified_base 3: mod_base = OTHER; note = 2'-O-methyl modified nucleotide
  modified_base 4: mod_base = OTHER; note = 2'-O-methyl modified nucleotide
  modified_base 5: mod_base = OTHER; note = 2'-O-methyl modified nucleotide
  modified_base 6: mod_base = OTHER; note = 2'-O-methyl modified nucleotide
  modified_base 7: mod_base = OTHER; note = 2'-fluoro modified nucleotide
  modified_base 8: mod_base = OTHER; note = 2'-O-methyl modified nucleotide
  modified_base 9: mod_base = OTHER; note = 2'-fluoro modified nucleotide
  modified_base 10: mod_base = OTHER; note = 2'-fluoro modified nucleotide
  modified_base 11: mod_base = OTHER; note = 2'-fluoro modified nucleotide
  modified_base 12: mod_base = OTHER; note = 2'-O-methyl modified nucleotide
  modified_base 13: mod_base = OTHER; note = 2'-O-methyl modified nucleotide
  modified_base 14: mod_base = OTHER; note = 2'-O-methyl modified nucleotide
  modified_base 15: mod_base = OTHER; note = 2'-O-methyl modified nucleotide
  modified_base 16: mod_base = OTHER; note = 2'-O-methyl modified nucleotide
  modified_base 17: mod_base = OTHER; note = 2'-O-methyl modified nucleotide
  modified_base 18: mod_base = OTHER; note = 2'-O-methyl modified nucleotide
  modified_base 19: mod_base = OTHER; note = 2'-O-methyl modified nucleotide
  modified_base 20: mod_base = OTHER; note = 2'-O-methyl modified nucleotide
  modified_base 21: mod_base = OTHER; note = 2'-O-methyl modified nucleotide
tgggcgtggatggctccgtgt

SEQ ID NO: 467 - RNA, 21 nt, synthetic construct
  source 1..21: mol_type = other RNA
  modified_base 1: mod_base = OTHER; note = 2'-O-methyl modified nucleotide with 3'-phosphorothioate linkage
  modified_base 2: mod_base = OTHER; note = 2'-O-methyl modified nucleotide with 3'-phosphorothioate linkage
  modified_base 3: mod_base = OTHER; note = 2'-O-methyl modified nucleotide
  modified_base 4: mod_base = OTHER; note = 2'-O-methyl modified nucleotide
  modified_base 5: mod_base = OTHER; note = 2'-O-methyl modified nucleotide
  modified_base 6: mod_base = OTHER; note = 2'-O-methyl modified nucleotide
  modified_base 7: mod_base = OTHER; note = 2'-fluoro modified nucleotide
  modified_base 8: mod_base = OTHER; note = 2'-O-methyl modified nucleotide
  modified_base 9: mod_base = OTHER; note = 2'-fluoro modified nucleotide
  modified_base 10: mod_base = OTHER; note = 2'-fluoro modified nucleotide
  modified_base 11: mod_base = OTHER; note = 2'-fluoro modified nucleotide
  modified_base 12: mod_base = OTHER; note = 2'-O-methyl modified nucleotide
  modified_base 13: mod_base = OTHER; note = 2'-O-methyl modified nucleotide
  modified_base 14: mod_base = OTHER; note = 2'-O-methyl modified nucleotide
  modified_base 15: mod_base = OTHER; note = 2'-O-methyl modified nucleotide
  modified_base 16: mod_base = OTHER; note = 2'-O-methyl modified nucleotide
  modified_base 17: mod_base = OTHER; note = 2'-O-methyl modified nucleotide
  modified_base 18: mod_base = OTHER; note = 2'-O-methyl modified nucleotide
  modified_base 19: mod_base = OTHER; note = 2'-O-methyl modified nucleotide
  modified_base 20: mod_base = OTHER; note = 2'-O-methyl modified nucleotide
  modified_base 21: mod_base = OTHER; note = 2'-O-methyl modified nucleotide
ggcgtggatggctccgtgtac

SEQ ID NO: 468 - RNA, 21 nt, synthetic construct
  source 1..21: mol_type = other RNA
  modified_base 1: mod_base = OTHER; note = 2'-O-methyl modified nucleotide with 3'-phosphorothioate linkage
  modified_base 2: mod_base = OTHER; note = 2'-O-methyl modified nucleotide with 3'-phosphorothioate linkage
  modified_base 3: mod_base = OTHER; note = 2'-O-methyl modified nucleotide
  modified_base 4: mod_base = OTHER; note = 2'-O-methyl modified nucleotide
  modified_base 5: mod_base = OTHER; note = 2'-O-methyl modified nucleotide
  modified_base 6: mod_base = OTHER; note = 2'-O-methyl modified nucleotide
  modified_base 7: mod_base = OTHER; note = 2'-fluoro modified nucleotide
  modified_base 8: mod_base = OTHER; note = 2'-O-methyl modified nucleotide
  modified_base 9: mod_base = OTHER; note = 2'-fluoro modified nucleotide
  modified_base 10: mod_base = OTHER; note = 2'-fluoro modified nucleotide
  modified_base 11: mod_base = OTHER; note = 2'-fluoro modified nucleotide
  modified_base 12: mod_base = OTHER; note = 2'-O-methyl modified nucleotide
  modified_base 13: mod_base = OTHER; note = 2'-O-methyl modified nucleotide
  modified_base 14: mod_base = OTHER; note = 2'-O-methyl modified nucleotide
  modified_base 15: mod_base = OTHER; note = 2'-O-methyl modified nucleotide
  modified_base 16: mod_base = OTHER; note = 2'-O-methyl modified nucleotide
  modified_base 17: mod_base = OTHER; note = 2'-O-methyl modified nucleotide
  modified_base 18: mod_base = OTHER; note = 2'-O-methyl modified nucleotide
  modified_base 19: mod_base = OTHER; note = 2'-O-methyl modified nucleotide
  modified_base 20: mod_base = OTHER; note = 2'-O-methyl modified nucleotide
  modified_base 21: mod_base = OTHER; note = 2'-O-methyl modified nucleotide
gcgtggatggctccgtgtaca

SEQ ID NO: 469 - RNA, 21 nt, synthetic construct
  source 1..21: mol_type = other RNA
  modified_base 1: mod_base = OTHER; note = 2'-O-methyl modified nucleotide with 3'-phosphorothioate linkage
  modified_base 2: mod_base = OTHER; note = 2'-O-methyl modified nucleotide with 3'-phosphorothioate linkage
  modified_base 3: mod_base = OTHER; note = 2'-O-methyl modified nucleotide
  modified_base 4: mod_base = OTHER; note = 2'-O-methyl modified nucleotide
  modified_base 5: mod_base = OTHER; note = 2'-O-methyl modified nucleotide
  modified_base 6: mod_base = OTHER; note = 2'-O-methyl modified nucleotide
  modified_base 7: mod_base = OTHER; note = 2'-fluoro modified nucleotide
  modified_base 8: mod_base = OTHER; note = 2'-O-methyl modified nucleotide
  modified_base 9: mod_base = OTHER; note = 2'-fluoro modified nucleotide
  modified_base 10: mod_base = OTHER; note = 2'-fluoro modified nucleotide
  modified_base 11: mod_base = OTHER; note = 2'-fluoro modified nucleotide
  modified_base 12: mod_base = OTHER; note = 2'-O-methyl modified nucleotide
  modified_base 13: mod_base = OTHER; note = 2'-O-methyl modified nucleotide
  modified_base 14: mod_base = OTHER; note = 2'-O-methyl modified nucleotide
  modified_base 15: mod_base = OTHER; note = 2'-O-methyl modified nucleotide
  modified_base 16: mod_base = OTHER; note = 2'-O-methyl modified nucleotide
  modified_base 17: mod_base = OTHER; note = 2'-O-methyl modified nucleotide
  modified_base 18: mod_base = OTHER; note = 2'-O-methyl modified nucleotide
  modified_base 19: mod_base = OTHER; note = 2'-O-methyl modified nucleotide
  modified_base 20: mod_base = OTHER; note = 2'-O-methyl modified nucleotide
  modified_base 21: mod_base = OTHER; note = 2'-O-methyl modified nucleotide
ggatggctccgtgtacaagct

SEQ ID NO: 470 - RNA, 21 nt, synthetic construct
  source 1..21: mol_type = other RNA
  modified_base 1: mod_base = OTHER; note = 2'-O-methyl modified nucleotide with 3'-phosphorothioate linkage
  modified_base 2: mod_base = OTHER; note = 2'-O-methyl modified nucleotide with 3'-phosphorothioate linkage
  modified_base 3: mod_base = OTHER; note = 2'-O-methyl modified nucleotide
  modified_base 4: mod_base = OTHER; note = 2'-O-methyl modified nucleotide
  modified_base 5: mod_base = OTHER; note = 2'-O-methyl modified nucleotide
  modified_base 6: mod_base = OTHER; note = 2'-O-methyl modified nucleotide
  modified_base 7: mod_base = OTHER; note = 2'-fluoro modified nucleotide
  modified_base 8: mod_base = OTHER; note = 2'-O-methyl modified nucleotide
  modified_base 9: mod_base = OTHER; note = 2'-fluoro modified nucleotide
  modified_base 10: mod_base = OTHER; note = 2'-fluoro modified nucleotide
  modified_base 11: mod_base = OTHER; note = 2'-fluoro modified nucleotide
  modified_base 12: mod_base = OTHER; note = 2'-O-methyl modified nucleotide
  modified_base 13: mod_base = OTHER; note = 2'-O-methyl modified nucleotide
  modified_base 14: mod_base = OTHER; note = 2'-O-methyl modified nucleotide
  modified_base 15: mod_base = OTHER; note = 2'-O-methyl modified nucleotide
  modified_base 16: mod_base = OTHER; note = 2'-O-methyl modified nucleotide
  modified_base 17: mod_base = OTHER; note = 2'-O-methyl modified nucleotide
  modified_base 18: mod_base = OTHER; note = 2'-O-methyl modified nucleotide
  modified_base 19: mod_base = OTHER; note = 2'-O-methyl modified nucleotide
  modified_base 20: mod_base = OTHER; note = 2'-O-methyl modified nucleotide
  modified_base 21: mod_base = OTHER; note = 2'-O-methyl modified nucleotide
gacgcccagctgcgagatcac

SEQ ID NO: 471 - RNA, 21 nt, synthetic construct
  source 1..21: mol_type = other RNA
  modified_base 1: mod_base = OTHER; note = 2'-O-methyl modified nucleotide with 3'-phosphorothioate linkage
  modified_base 2: mod_base = OTHER; note = 2'-O-methyl modified nucleotide with 3'-phosphorothioate linkage
  modified_base 3: mod_base = OTHER; note = 2'-O-methyl modified nucleotide
  modified_base 4: mod_base = OTHER; note = 2'-O-methyl modified nucleotide
  modified_base 5: mod_base = OTHER; note = 2'-O-methyl modified nucleotide
  modified_base 6: mod_base = OTHER; note = 2'-O-methyl modified nucleotide
  modified_base 7: mod_base = OTHER; note = 2'-fluoro modified nucleotide
  modified_base 8: mod_base = OTHER; note = 2'-O-methyl modified nucleotide
  modified_base 9: mod_base = OTHER; note = 2'-fluoro modified nucleotide
  modified_base 10: mod_base = OTHER; note = 2'-fluoro modified nucleotide
  modified_base 11: mod_base = OTHER; note = 2'-fluoro modified nucleotide
  modified_base 12: mod_base = OTHER; note = 2'-O-methyl modified nucleotide
  modified_base 13: mod_base = OTHER; note = 2'-O-methyl modified nucleotide
  modified_base 14: mod_base = OTHER; note = 2'-O-methyl modified nucleotide
  modified_base 15: mod_base = OTHER; note = 2'-O-methyl modified nucleotide
  modified_base 16: mod_base = OTHER; note = 2'-O-methyl modified nucleotide
  modified_base 17: mod_base = OTHER; note = 2'-O-methyl modified nucleotide
  modified_base 18: mod_base = OTHER; note = 2'-O-methyl modified nucleotide
  modified_base 19: mod_base = OTHER; note = 2'-O-methyl modified nucleotide
  modified_base 20: mod_base = OTHER; note = 2'-O-methyl modified nucleotide
  modified_base 21: mod_base = OTHER; note = 2'-O-methyl modified nucleotide
cgagatcaccttcatcgagtc

SEQ ID NO: 472 - RNA, 21 nt, synthetic construct
  source 1..21: mol_type = other RNA
  modified_base 1: mod_base = OTHER; note = 2'-O-methyl modified nucleotide with 3'-phosphorothioate linkage
  modified_base 2: mod_base = OTHER; note = 2'-O-methyl modified nucleotide with 3'-phosphorothioate linkage
  modified_base 3: mod_base = OTHER; note = 2'-O-methyl modified nucleotide
  modified_base 4: mod_base = OTHER; note = 2'-O-methyl modified nucleotide
  modified_base 5: mod_base = OTHER; note = 2'-O-methyl modified nucleotide
  modified_base 6: mod_base = OTHER; note = 2'-O-methyl modified nucleotide
  modified_base 7: mod_base = OTHER; note = 2'-fluoro modified nucleotide
  modified_base 8: mod_base = OTHER; note = 2'-O-methyl modified nucleotide
  modified_base 9: mod_base = OTHER; note = 2'-fluoro modified nucleotide
  modified_base 10: mod_base = OTHER; note = 2'-fluoro modified nucleotide
  modified_base 11: mod_base = OTHER; note = 2'-fluoro modified nucleotide
  modified_base 12: mod_base = OTHER; note = 2'-O-methyl modified nucleotide
  modified_base 13: mod_base = OTHER; note = 2'-O-methyl modified nucleotide
  modified_base 14: mod_base = OTHER; note = 2'-O-methyl modified nucleotide
  modified_base 15: mod_base = OTHER; note = 2'-O-methyl modified nucleotide
  modified_base 16: mod_base = OTHER; note = 2'-O-methyl modified nucleotide
  modified_base 17: mod_base = OTHER; note = 2'-O-methyl modified nucleotide
  modified_base 18: mod_base = OTHER; note = 2'-O-methyl modified nucleotide
  modified_base 19: mod_base = OTHER; note = 2'-O-methyl modified nucleotide
  modified_base 20: mod_base = OTHER; note = 2'-O-methyl modified nucleotide
  modified_base 21: mod_base = OTHER; note = 2'-O-methyl modified nucleotide
gatcaccttcatcgagtcgga

SEQ ID NO: 473 - RNA, 21 nt, synthetic construct
  source 1..21: mol_type = other RNA
  modified_base 1: mod_base = OTHER; note = 2'-O-methyl modified nucleotide with 3'-phosphorothioate linkage
  modified_base 2: mod_base = OTHER; note = 2'-O-methyl modified nucleotide with 3'-phosphorothioate linkage
  modified_base 3: mod_base = OTHER; note = 2'-O-methyl modified nucleotide
  modified_base 4: mod_base = OTHER; note = 2'-O-methyl modified nucleotide
  modified_base 5: mod_base = OTHER; note = 2'-O-methyl modified nucleotide
  modified_base 6: mod_base = OTHER; note = 2'-O-methyl modified nucleotide
  modified_base 7: mod_base = OTHER; note = 2'-fluoro modified nucleotide
  modified_base 8: mod_base = OTHER; note = 2'-O-methyl modified nucleotide
  modified_base 9: mod_base = OTHER; note = 2'-fluoro modified nucleotide
  modified_base 10: mod_base = OTHER; note = 2'-fluoro modified nucleotide
  modified_base 11: mod_base = OTHER; note = 2'-fluoro modified nucleotide
  modified_base 12: mod_base = OTHER; note = 2'-O-methyl modified nucleotide
  modified_base 13: mod_base = OTHER; note = 2'-O-methyl modified nucleotide
  modified_base 14: mod_base = OTHER; note = 2'-O-methyl modified nucleotide
  modified_base 15: mod_base = OTHER; note = 2'-O-methyl modified nucleotide
  modified_base 16: mod_base = OTHER; note = 2'-O-methyl modified nucleotide
  modified_base 17: mod_base = OTHER; note = 2'-O-methyl modified nucleotide
  modified_base 18: mod_base = OTHER; note = 2'-O-methyl modified nucleotide
  modified_base 19: mod_base = OTHER; note = 2'-O-methyl modified nucleotide
  modified_base 20: mod_base = OTHER; note = 2'-O-methyl modified nucleotide
  modified_base 21: mod_base = OTHER; note = 2'-O-methyl modified nucleotide
atcaccttcatcgagtcggag

SEQ ID NO: 474 - RNA, 21 nt, synthetic construct
  source 1..21: mol_type = other RNA
  modified_base 1: mod_base = OTHER; note = 2'-O-methyl modified nucleotide with 3'-phosphorothioate linkage
  modified_base 2: mod_base = OTHER; note = 2'-O-methyl modified nucleotide with 3'-phosphorothioate linkage
  modified_base 3: mod_base = OTHER; note = 2'-O-methyl modified nucleotide
  modified_base 4: mod_base = OTHER; note = 2'-O-methyl modified nucleotide
  modified_base 5: mod_base = OTHER; note = 2'-O-methyl modified nucleotide
  modified_base 6: mod_base = OTHER; note = 2'-O-methyl modified nucleotide
  modified_base 7: mod_base = OTHER; note = 2'-fluoro modified nucleotide
  modified_base 8: mod_base = OTHER; note = 2'-O-methyl modified nucleotide
  modified_base 9: mod_base = OTHER; note = 2'-fluoro modified nucleotide
  modified_base 10: mod_base = OTHER; note = 2'-fluoro modified nucleotide
  modified_base 11: mod_base = OTHER; note = 2'-fluoro modified nucleotide
  modified_base 12: mod_base = OTHER; note = 2'-O-methyl modified nucleotide
  modified_base 13: mod_base = OTHER; note = 2'-O-methyl modified nucleotide
  modified_base 14: mod_base = OTHER; note = 2'-O-methyl modified nucleotide
  modified_base 15: mod_base = OTHER; note = 2'-O-methyl modified nucleotide
  modified_base 16: mod_base = OTHER; note = 2'-O-methyl modified nucleotide
  modified_base 17: mod_base = OTHER; note = 2'-O-methyl modified nucleotide
  modified_base 18: mod_base = OTHER; note = 2'-O-methyl modified nucleotide
  modified_base 19: mod_base = OTHER; note = 2'-O-methyl modified nucleotide
  modified_base 20: mod_base = OTHER; note = 2'-O-methyl modified nucleotide
  modified_base 21: mod_base = OTHER; note = 2'-O-methyl modified nucleotide
gatgcatttccacactgtcag

SEQ ID NO: 475 - RNA, 21 nt, synthetic construct
  source 1..21: mol_type = other RNA
  modified_base 1: mod_base = OTHER; note = 2'-O-methyl modified nucleotide with 3'-phosphorothioate linkage
  modified_base 2: mod_base = OTHER; note = 2'-O-methyl modified nucleotide with 3'-phosphorothioate linkage
  modified_base 3: mod_base = OTHER; note = 2'-O-methyl modified nucleotide
  modified_base 4: mod_base = OTHER; note = 2'-O-methyl modified nucleotide
  modified_base 5: mod_base = OTHER; note = 2'-O-methyl modified nucleotide
  modified_base 6: mod_base = OTHER; note = 2'-O-methyl modified nucleotide
  modified_base 7: mod_base = OTHER; note = 2'-fluoro modified nucleotide
  modified_base 8: mod_base = OTHER; note = 2'-O-methyl modified nucleotide
  modified_base 9: mod_base = OTHER; note = 2'-fluoro modified nucleotide
  modified_base 10: mod_base = OTHER; note = 2'-fluoro modified nucleotide
  modified_base 11: mod_base = OTHER; note = 2'-fluoro modified nucleotide
  modified_base 12: mod_base = OTHER; note = 2'-O-methyl modified nucleotide
  modified_base 13: mod_base = OTHER; note = 2'-O-methyl modified nucleotide
  modified_base 14: mod_base = OTHER; note = 2'-O-methyl modified nucleotide
  modified_base 15: mod_base = OTHER; note = 2'-O-methyl modified nucleotide
  modified_base 16: mod_base = OTHER; note = 2'-O-methyl modified nucleotide
  modified_base 17: mod_base = OTHER; note = 2'-O-methyl modified nucleotide
  modified_base 18: mod_base = OTHER; note = 2'-O-methyl modified nucleotide
  modified_base 19: mod_base = OTHER; note = 2'-O-methyl modified nucleotide
  modified_base 20: mod_base = OTHER; note = 2'-O-methyl modified nucleotide
  modified_base 21: mod_base = OTHER; note = 2'-O-methyl modified nucleotide
tgggaactcatcctgtgtggg

SEQ ID NO: 476 - RNA, 21 nt, synthetic construct
  source 1..21: mol_type = other RNA
  modified_base 1: mod_base = OTHER; note = 2'-O-methyl modified nucleotide with 3'-phosphorothioate linkage
  modified_base 2: mod_base = OTHER; note = 2'-O-methyl modified nucleotide with 3'-phosphorothioate linkage
  modified_base 3: mod_base = OTHER; note = 2'-O-methyl modified nucleotide
  modified_base 4: mod_base = OTHER; note = 2'-O-methyl modified nucleotide
  modified_base 5: mod_base = OTHER; note = 2'-O-methyl modified nucleotide
  modified_base 6: mod_base = OTHER; note = 2'-O-methyl modified nucleotide
  modified_base 7: mod_base = OTHER; note = 2'-fluoro modified nucleotide
  modified_base 8: mod_base = OTHER; note = 2'-O-methyl modified nucleotide
  modified_base 9: mod_base = OTHER; note = 2'-fluoro modified nucleotide
  modified_base 10: mod_base = OTHER; note = 2'-fluoro modified nucleotide
  modified_base 11: mod_base = OTHER; note = 2'-fluoro modified nucleotide
  modified_base 12: mod_base = OTHER; note = 2'-O-methyl modified nucleotide
  modified_base 13: mod_base = OTHER; note = 2'-O-methyl modified nucleotide
  modified_base 14: mod_base = OTHER; note = 2'-O-methyl modified nucleotide
  modified_base 15: mod_base = OTHER; note = 2'-O-methyl modified nucleotide
  modified_base 16: mod_base = OTHER; note = 2'-O-methyl modified nucleotide
  modified_base 17: mod_base = OTHER; note = 2'-O-methyl modified nucleotide
  modified_base 18: mod_base = OTHER; note = 2'-O-methyl modified nucleotide
  modified_base 19: mod_base = OTHER; note = 2'-O-methyl modified nucleotide
  modified_base 20: mod_base = OTHER; note = 2'-O-methyl modified nucleotide
  modified_base 21: mod_base = OTHER; note = 2'-O-methyl modified nucleotide
gcagctccaacagcttgacca

SEQ ID NO: 477 - RNA, 21 nt, synthetic construct
  source 1..21: mol_type = other RNA
  modified_base 1: mod_base = OTHER; note = 2'-O-methyl modified nucleotide with 3'-phosphorothioate linkage
  modified_base 2: mod_base = OTHER; note = 2'-O-methyl modified nucleotide with 3'-phosphorothioate linkage
  modified_base 3: mod_base = OTHER; note = 2'-O-methyl modified nucleotide
  modified_base 4: mod_base = OTHER; note = 2'-O-methyl modified nucleotide
  modified_base 5: mod_base = OTHER; note = 2'-O-methyl modified nucleotide
  modified_base 6: mod_base = OTHER; note = 2'-O-methyl modified nucleotide
  modified_base 7: mod_base = OTHER; note = 2'-fluoro modified nucleotide
  modified_base 8: mod_base = OTHER; note = 2'-O-methyl modified nucleotide
  modified_base 9: mod_base = OTHER; note = 2'-fluoro modified nucleotide
  modified_base 10: mod_base = OTHER; note = 2'-fluoro modified nucleotide
  modified_base 11: mod_base = OTHER; note = 2'-fluoro modified nucleotide
  modified_base 12: mod_base = OTHER; note = 2'-O-methyl modified nucleotide
  modified_base 13: mod_base = OTHER; note = 2'-O-methyl modified nucleotide
  modified_base 14: mod_base = OTHER; note = 2'-O-methyl modified nucleotide
  modified_base 15: mod_base = OTHER; note = 2'-O-methyl modified nucleotide
  modified_base 16: mod_base = OTHER; note = 2'-O-methyl modified nucleotide
  modified_base 17: mod_base = OTHER; note = 2'-O-methyl modified nucleotide
  modified_base 18: mod_base = OTHER; note = 2'-O-methyl modified nucleotide
  modified_base 19: mod_base = OTHER; note = 2'-O-methyl modified nucleotide
  modified_base 20: mod_base = OTHER; note = 2'-O-methyl modified nucleotide
  modified_base 21: mod_base = OTHER; note = 2'-O-methyl modified nucleotide
ccaacagcttgaccagaccta

SEQ ID NO: 478 - RNA, 21 nt, synthetic construct
  source 1..21: mol_type = other RNA
  modified_base 1: mod_base = OTHER; note = 2'-O-methyl modified nucleotide with 3'-phosphorothioate linkage
  modified_base 2: mod_base = OTHER; note = 2'-O-methyl modified nucleotide with 3'-phosphorothioate linkage
  modified_base 3: mod_base = OTHER; note = 2'-O-methyl modified nucleotide
  modified_base 4: mod_base = OTHER; note = 2'-O-methyl modified nucleotide
  modified_base 5: mod_base = OTHER; note = 2'-O-methyl modified nucleotide
  modified_base 6: mod_base = OTHER; note = 2'-O-methyl modified nucleotide
  modified_base 7: mod_base = OTHER; note = 2'-fluoro modified nucleotide
  modified_base 8: mod_base = OTHER; note = 2'-O-methyl modified nucleotide
  modified_base 9: mod_base = OTHER; note = 2'-fluoro modified nucleotide
  modified_base 10: mod_base = OTHER; note = 2'-fluoro modified nucleotide
  modified_base 11: mod_base = OTHER; note = 2'-fluoro modified nucleotide
  modified_base 12: mod_base = OTHER; note = 2'-O-methyl modified nucleotide
  modified_base 13: mod_base = OTHER; note = 2'-O-methyl modified nucleotide
  modified_base 14: mod_base = OTHER; note = 2'-O-methyl modified nucleotide
  modified_base 15: mod_base = OTHER; note = 2'-O-methyl modified nucleotide
  modified_base 16: mod_base = OTHER; note = 2'-O-methyl modified nucleotide
  modified_base 17: mod_base = OTHER; note = 2'-O-methyl modified nucleotide
  modified_base 18: mod_base = OTHER; note = 2'-O-methyl modified nucleotide
  modified_base 19: mod_base = OTHER; note = 2'-O-methyl modified nucleotide
  modified_base 20: mod_base = OTHER; note = 2'-O-methyl modified nucleotide
  modified_base 21: mod_base = OTHER; note = 2'-O-methyl modified nucleotide
gcttgtgattctgggatggac

SEQ ID NO: 479 - RNA, 21 nt, synthetic construct
  source 1..21: mol_type = other RNA
  modified_base 1: mod_base = OTHER; note = 2'-O-methyl modified nucleotide with 3'-phosphorothioate linkage
  modified_base 2: mod_base = OTHER; note = 2'-O-methyl modified nucleotide with 3'-phosphorothioate linkage
  modified_base 3: mod_base = OTHER; note = 2'-O-methyl modified nucleotide
  modified_base 4: mod_base = OTHER; note = 2'-O-methyl modified nucleotide
  modified_base 5: mod_base = OTHER; note = 2'-O-methyl modified nucleotide
  modified_base 6: mod_base = OTHER; note = 2'-O-methyl modified nucleotide
  modified_base 7: mod_base = OTHER; note = 2'-fluoro modified nucleotide
  modified_base 8: mod_base = OTHER; note = 2'-O-methyl modified nucleotide
  modified_base 9: mod_base = OTHER; note = 2'-fluoro modified nucleotide
  modified_base 10: mod_base = OTHER; note = 2'-fluoro modified nucleotide
  modified_base 11: mod_base = OTHER; note = 2'-fluoro modified nucleotide
  modified_base 12: mod_base = OTHER; note = 2'-O-methyl modified nucleotide
  modified_base 13: mod_base = OTHER; note = 2'-O-methyl modified nucleotide
  modified_base 14: mod_base = OTHER; note = 2'-O-methyl modified nucleotide
  modified_base 15: mod_base = OTHER; note = 2'-O-methyl modified nucleotide
  modified_base 16: mod_base = OTHER; note = 2'-O-methyl modified nucleotide
  modified_base 17: mod_base = OTHER; note = 2'-O-methyl modified nucleotide
  modified_base 18: mod_base = OTHER; note = 2'-O-methyl modified nucleotide
  modified_base 19: mod_base = OTHER; note = 2'-O-methyl modified nucleotide
  modified_base 20: mod_base = OTHER; note = 2'-O-methyl modified nucleotide
  modified_base 21: mod_base = OTHER; note = 2'-O-methyl modified nucleotide
cttgtgattctgggatggacc

SEQ ID NO: 480 - RNA, 21 nt, synthetic construct
  source 1..21: mol_type = other RNA
  modified_base 1: mod_base = OTHER; note = 2'-O-methyl modified nucleotide with 3'-phosphorothioate linkage
  modified_base 2: mod_base = OTHER; note = 2'-O-methyl modified nucleotide with 3'-phosphorothioate linkage
  modified_base 3: mod_base = OTHER; note = 2'-O-methyl modified nucleotide
  modified_base 4: mod_base = OTHER; note = 2'-O-methyl modified nucleotide
  modified_base 5: mod_base = OTHER; note = 2'-O-methyl modified nucleotide
  modified_base 6: mod_base = OTHER; note = 2'-O-methyl modified nucleotide
  modified_base 7: mod_base = OTHER; note = 2'-fluoro modified nucleotide
  modified_base 8: mod_base = OTHER; note = 2'-O-methyl modified nucleotide
  modified_base 9: mod_base = OTHER; note = 2'-fluoro modified nucleotide
  modified_base 10: mod_base = OTHER; note = 2'-fluoro modified nucleotide
  modified_base 11: mod_base = OTHER; note = 2'-fluoro modified nucleotide
  modified_base 12: mod_base = OTHER; note = 2'-O-methyl modified nucleotide
  modified_base 13: mod_base = OTHER; note = 2'-O-methyl modified nucleotide
  modified_base 14: mod_base = OTHER; note = 2'-O-methyl modified nucleotide
  modified_base 15: mod_base = OTHER; note = 2'-O-methyl modified nucleotide
  modified_base 16: mod_base = OTHER; note = 2'-O-methyl modified nucleotide
  modified_base 17: mod_base = OTHER; note = 2'-O-methyl modified nucleotide
  modified_base 18: mod_base = OTHER; note = 2'-O-methyl modified nucleotide
  modified_base 19: mod_base = OTHER; note = 2'-O-methyl modified nucleotide
  modified_base 20: mod_base = OTHER; note = 2'-O-methyl modified nucleotide
  modified_base 21: mod_base = OTHER; note = 2'-O-methyl modified nucleotide
cgctggctcaggaagaaaccc

SEQ ID NO: 481 - DNA, 2745 bp, Homo sapiens
  source 1..2745: mol_type = genomic DNA
actccacacctggctggagcaggaaatgccgagcggcgcctgagccccagggaagcaggctaggatgtgagagacacagtcacctgcagcctaattactcaaaagctgtccccaggtcacagaagggagaggacatttcccactgaatctgtctgaaggacactaagccccacagctcaacacaaccaggagagaaagcgctgaggacgccacccaagcgcccagcaatggccctgcctggagaacatccaggctcagtgaggaagggtccagaagggaatgcttgccgactcgttggagaacaatgaaaaggaggaaactgtgactgaacctcaaaccccaaaccagcccgaggagaaccacattctcccagggacccagggcgggccgtgacccctgcggcggagaagccttggatatttccacttcagaagcctactggggaaggctgaggggtcccagctccccacgctggctgctgtgcagatgctggacgacagagccaggatggaggccgccaagaaggagaaggtagagcagatcctggcagagttccagctgcaggaggaggacctgaagaaggtgatgagacggatgcagaaggagatggaccgcggcctgaggctggagacccatgaagaggccagtgtgaagatgctgcccacctacgtgcgctccaccccagaaggctcagaagtcggggacttcctctccctggacctgggtggcactaacttcagggtgatgctggtgaaggtgggagaaggtgaggaggggcagtggagcgtgaagaccaaacaccagatgtactccatccccgaggacgccatgaccggcactgctgagatgctcttcgactacatctctgagtgcatctccgacttcctggacaagcatcagatgaaacacaagaagctgcccctgggcttcaccttctcctttcctgtgaggcacgaagacatcgataagggcatccttctcaactggaccaagggcttcaaggcctcaggagcagaagggaacaatgtcgtggggcttctgcgagacgctatcaaacggagaggggactttgaaatggatgtggtggcaatggtgaatgacacggtggccacgatgatctcctgctactacgaagaccatcagtgcgaggtcggcatgatcgtgggcacgggctgcaatgcctgctacatggaggagatgcagaatgtggagctggtggagggggacgagggccgcatgtgcgtcaataccgagtggggcgccttcggggactccggcgagctggacgagttcctgctggagtatgaccgcctggtggacgagagctctgcaaaccccggtcagcagctgtatgagaagctcataggtggcaagtacatgggcgagctggtgcggcttgtgctgctcaggctcgtggacgaaaacctgctcttccacggggaggcctccgagcagctgcgcacacgcggagccttcgagacgcgcttcgtgtcgcaggtggagagcgacacgggcgaccgcaagcagatctacaacatcctgagcacgctggggctgcgaccctcgaccaccgactgcgacatcgtgcgccgcgcctgcgagagcgtgtctacgcgcgctgcgcacatgtgctcggcggggctggcgggcgtcatcaaccgcatgcgcgagagccgcagcgaggacgtaatgcgcatcactgtgggcgtggatggctccgtgtacaagctgcaccccagcttcaaggagcggttccatgccagcgtgcgcaggctgacgcccagctgcgagatcaccttcatcgagtcggaggagggcagtggccggggcgcggccctggtctcggcggtggcctgtaagaaggcctgtatgctgggccagtgagagcagtggccgcaagcgcagggaggatgccacagccccacagcacccaggctccatggggaagtgctccccacacgtgctcgcagcctggcggggcaggaggcctggccttgtcaggacccaggccgcctgccataccgctggggaacagagcgggcctcttccctcagtttttcggtgggacagccccagggccctaacgggggtgcggcaggagcaggaacagagactctggaagccccccacctttctcgctggaatcaatttcccagaagggagttgctcactcaggactttgatgcatttccacactgtcagagctgttggcctcgcctgggcccaggctctgggaaggggtgccctctggatcctgctgtggcctcacttccctgggaactcatcctgtgtggggaggcagctccaacagcttgaccagacctagacctgggccaaaagggcagccaggggctgctcatcacccagtcctggccattttcttgcctgaggctcaagaggcccagggagcaatgggagggggctccatggaggaggtgtcccaagctttgaatacccccagagaccttttctctcccataccatcactgagtggcttgtgattctgggatggaccctcgcagcaggtgcaagagacagagcccccaagcctctgccccaaggggcccacaaaggggagaagggccagccctacatcttcagctcccatagcgctggctcaggaagaaaccccaagcagcattcagcacaccccaagggacaaccccatcatatgacatgccaccctctccatgcccaacctaagattgtgtgggttttttaattaaaaatgttaaaagttttaaa

1-2. (canceled)

3. An RNAi agent that inhibits expression of glucokinase (GCK) comprising an antisense strand and a sense strand that at least partially complements the antisense strand, wherein:
(a) the antisense strand comprises a nucleobase sequence of any one of SEQ ID NOS: 200, 208, 227, 276, 278, 281, and 282; and/or
(b) the sense strand comprises a nucleobase sequence of any one of SEQ ID NOS: 296, 304, 323, 372, 374, 377, and 378.

4. The RNAi agent of claim 3, wherein one or more nucleotides of the antisense stand and/or the sense strand are modified.

5. The RNAi agent of claim 4, wherein the antisense strand has a modification pattern according to nsNfsnnnNfnnnnnnnNfnNfnnnnnsnsn, or the sense strand has a modification pattern according to nsnsnnnnNfnNfNfNfnnnnnnnnsnsn or nsnsnnnnNfnNfNfNfnnnnnnnnnn.

6-7. (canceled)

8. The RNAi agent of claim 3, wherein:
(a) the antisense strand comprises a nucleobase sequence of any one of SEQ ID NOS: 200, 208, 227, 276, 278, 281, and 282; and
(b) the sense strand comprises a nucleobase sequence of any one of SEQ ID NOS: 296, 304, 323, 372, 374, 377, and 378.

9. (canceled)

10. The RNAi agent of claim 3, wherein the antisense strand and the sense strand form a duplex of at least 14 bases in length.

11-13. (canceled)

14. The RNAi agent of claim 3, wherein the antisense strand comprises a nucleobase sequence of any one of SEQ ID NOS: 200, 208, 227, 276, 278, 281, and 282.

15-28. (canceled)

29. The RNAi agent of claim 3, wherein the antisense strand comprises a modified nucleotide sequence of any one of SEQ ID NOS: 200, 208, 227, 276, 278, 281, and 282.

30-41. (canceled)

42. The RNAi agent of claim 3, wherein the sense strand comprises a nucleobase sequence of any one of SEQ ID NOS: 296, 304, 323, 372, 374, 377, and 378.

43-48. (canceled)

49. The RNAi agent of claim 3, wherein the sense strand comprises a modified nucleotide sequence of any one of SEQ ID NOS: 296, 304, 323, 372, 374, 377, 378, 392, 400, 419, 468, 470, 473, and 474.

50-52. (canceled)

53. The RNAi agent of claim 3, wherein:
(a) the sense strand comprises a nucleobase sequence of SEQ ID NO: 296 and the antisense strand comprises a nucleobase sequence of SEQ ID NO: 200;
(b) the sense strand comprises a nucleobase sequence of SEQ ID NO: 304 and the antisense strand comprises a nucleobase sequence of SEQ ID NO: 208;
(c) the sense strand comprises a nucleobase sequence of SEQ ID NO: 323 and the antisense strand comprises a nucleobase sequence of SEQ ID NO: 227;
(d) the sense strand comprises a nucleobase sequence of SEQ ID NO: 378 and the antisense strand comprises a nucleobase sequence according to SEQ ID NO: 282;
(e) the sense strand comprises a nucleobase sequence of SEQ ID NO: 372 and the antisense strand comprises a nucleobase sequence of SEQ ID NO: 276;
(f) the sense strand comprises a nucleobase sequence of SEQ ID NO: 374 and the antisense strand comprises a nucleobase sequence of SEQ ID NO: 278;
(g) the sense strand comprises a nucleobase sequence of SEQ ID NO: 377 and the antisense strand comprises a nucleobase sequence of SEQ ID NO: 281.

54. The RNAi agent of claim 3, wherein:
(a) the sense strand comprises a modified nucleotide sequence according to of SEQ ID NO: 296 and the antisense strand comprises a modified nucleotide sequence according to of SEQ ID NO: 200;
(b) the sense strand comprises a modified nucleotide sequence of SEQ ID NO: 304 and the antisense strand comprises a modified nucleotide sequence of SEQ ID NO: 208;
(c) the sense strand comprises a modified nucleotide sequence of SEQ ID NO: 323 and the antisense strand comprises a modified nucleotide sequence of SEQ ID NO: 227;
(d) the sense strand comprises a modified nucleotide sequence of SEQ ID NO: 372 and the antisense strand comprises a modified nucleotide sequence of SEQ ID NO: 276;
(c) the sense strand comprises a modified nucleotide sequence of SEQ ID NO: 374 and the antisense strand comprises a modified nucleotide sequence of SEQ ID NO: 278;
(f) the sense strand comprises a modified nucleotide sequence of SEQ ID NO: 377 and the antisense strand comprises a modified nucleotide sequence of SEQ ID NO: 281; or
(g) the sense strand comprises a modified nucleotide sequence of SEQ ID NO: 378 and the antisense strand comprises a modified nucleotide sequence of SEQ ID NO: 282;

55. The RNAi agent of claim 3, wherein:
(a) the sense strand comprises a modified nucleotide sequence according to SEQ ID NO: 400 and the antisense strand comprises a modified nucleotide sequence according to SEQ ID NO: 208;
(b) the sense strand comprises a modified nucleotide sequence according to SEQ ID NO: 419 and the antisense strand comprises a modified nucleotide sequence according to SEQ ID NO: 227;
(c) the sense strand comprises a modified nucleotide sequence according to SEQ ID NO: 392 and the antisense strand comprises a modified nucleotide sequence according to SEQ ID NO: 200;
(d) the sense strand comprises a modified nucleotide sequence according to SEQ ID NO: 468 and the antisense strand comprises a modified nucleotide sequence according to SEQ ID NO: 276;
(e) the sense strand comprises a modified nucleotide sequence according to SEQ ID NO: 470 and the antisense strand comprises a modified nucleotide sequence according to SEQ ID NO: 278;
(f) the sense strand comprises a modified nucleotide sequence according to SEQ ID NO: 473 and the antisense strand comprises a modified nucleotide sequence according to SEQ ID NO: 281; or
(g) the sense strand comprises a modified nucleotide sequence according to SEQ ID NO: 474 and the antisense strand comprises a modified nucleotide sequence according to SEQ ID NO: 282.

56. The RNAi agent of claim 55, wherein the RNAi agent comprises a targeting ligand comprising a structure according to Formula I: [chemical structure]
wherein R is a linker conjugated to the wherein the targeting ligand is conjugated to the 3′ end of the sense strand, wherein R comprises a structure according to Formula III: [chemical structure]
and wherein connection point C of Formula III is conjugated to Formula I, and connection point D of Formula III is conjugated to the 3′ end of the sense strand;
or wherein the RNAi agent comprises a targeting ligand comprising a structure according to Formula V:

[chemical structure]

57-69. (canceled)

70. The RNAi agent of claim 3, wherein the RNAi agent comprises a targeting ligand comprising a galactose trimer.

71-73. (canceled)

74. The RNAi agent of claim 55, wherein the RNAi agent comprises a targeting ligand and linker according to Formula V:

[chemical structure]

75-122. (canceled)

123. A pharmaceutical composition comprising the RNAi agent of claim 3 and a pharmaceutically acceptable carrier.

124. A lipid nanoparticle comprising the RNAi agent of claim 3.

125. (canceled)

126. A method of treating metabolic dysfunction-associated steatotic liver disease (MASLD) or metabolic dysfunction-associated steatotic liver (MASL) in a subject, comprising:
administering to the subject an effective amount of a liver-targeted modified oligonucleotide, a liver-targeted oligomeric duplex, or a liver-targeted RNAi agent that inhibits expression of glucokinase (GCK).

127. (canceled)

128. A method of inhibiting expression of glucokinase (GCK) in a subject, comprising:
administering to the subject an effective amount of the RNAi agent of claim 3.

129. (canceled)

130. A method of controlling or reducing liver fat accumulation in a subject, comprising:
administering to the subject an effective amount of a liver-targeted modified oligonucleotide, a liver-targeted oligomeric duplex, or a liver-targeted RNAi agent that inhibits expression of glucokinase (GCK).

131-202. (canceled)

203. A method of producing the RNAi agent according to claim 3, comprising annealing together the sense strand and the antisense strand.

204. (canceled)

205. The RNAi agent of claim 3, further comprising a targeting ligand that targets a hepatocyte.

206. The RNAi agent of claim 55, further comprising a targeting ligand that targets a hepatocyte.

207. The RNAi agent of claim 55, wherein the RNAi agent comprises a targeting ligand comprising a structure according to Formula I: [chemical structure]
wherein R is a linker conjugated to the wherein the targeting ligand is conjugated to the 3′ end of the sense strand, wherein R comprises a structure according to Formula III: [chemical structure]
and wherein connection point C of Formula III is conjugated to Formula I, and connection point D of Formula III is conjugated to the 3′ end of the sense strand

208. A pharmaceutical composition comprising the RNAi agent of claim 56 and a pharmaceutically acceptable carrier.

209. The method of claim 126, wherein the RNAi agent comprises an antisense strand and a sense strand that at least partially complements the antisense strand, wherein:
(a) the antisense strand comprises a nucleobase sequence that differs by 0 or 1 nucleobases from any one of SEQ ID NOS: 200, 208, 227, 244, 276, 278, 281, and 282; and/or
(b) the sense strand comprises a nucleobase sequence that differs by 0 or 1 nucleobases from any one of SEQ ID NOS: 296, 304, 323, 340, 372, 374, 377, and 378.

210. The method of claim 130, wherein the RNAi agent comprises an antisense strand and a sense strand that at least partially complements the antisense strand, wherein:
(a) the antisense strand comprises a nucleobase sequence that differs by 0 or 1 nucleobases from any one of SEQ ID NOS: 200, 208, 227, 244, 276, 278, 281, and 282; and/or
(b) the sense strand comprises a nucleobase that differs by 0 or 1 nucleobases from any one of SEQ ID NOS: 296, 304, 323, 340, 372, 374, 377, and 378.
